United States Patent Application Publication US 2003/0186277 A1 - sequence listing, part 2

SEQ ID NO: 1 - DNA, 3673778 bp, Artificial Sequence (residues 1,836,890-3,673,778 of 3,673,778)
  chemically treated genomic DNA (Homo sapiens)
  unsure (3294164)
attgtagtttttatttcgtgggtttaagtagtttttttattttagtttttttagtagttgggattataagtatatattattatgtttagttaattgtttgtatttttggtagagattgttttgttatgttatttaggttgttttgtattttttgagtttaaatagtttgtttatttcggttttttaaagtgtcgggattagaggcgtgagttattatatttaattttattgtattgaattttaagaagttggtgagattgatattattttatttatagatgaggaaagtagggtttaaaaggttcgggaatttgtttgaaattttatagtttttaggttattgttttttaaagggggatttaagtttagtgtttttatttttagattttggtgttttttttggttttatttatttttggttttttgttagttttgttattagatggttttttaattttttggttgaaaggtttattttatttagtttttagtttttttttttttttttttttgagacggagttttgttttgtcgtttaggttggagtgtagtggtatgatttcggtttattataatttttgttttttgggtttaagcgatttttttgttttagttttttaagtagttgagattataggtatatattattatgtttagttaatttttttatttttatttattaatttttaaatttttatttgtttatttatttttgagacggagtttttttttgttttttaggttggagtgtagtggtagtattttgatttattgttattttcgttttttgggtttaagtgattttttttttttagttttttgagtagtcgggattataggagtttgttattatgttcgattaatttttgtatttttaatagagatggggttttattatgttggttagattgttttcgaatttttgattttagatgatttatttgtttcggttttttaaagtgttgggattataggtatgagttattatgttcgatttaatttttgtgtttttagtagagatggggttttaatatgttggttaggttggttttaaatttttgattttaagtgatttatttattttagttttttaaaatgttgggattataggtatgagttatcgtgtttattttatagaatgttttttggttttgtttttgttttttgttttgttttgttttgttttgtttgaaaaggagttttattttgtcgtttaggttggagtgtagtggtataatttcggtttattgtaatttttattttttaggtttaagagatttttttgttttagttttttaagtagttgggattataggcgtagggattgtaggcgtatgttattacgtttggttaattttttgtatttttagtagatacggggttttattatgttagttaggatggtttcgattttttgattttgtgatttgtttattttagttttttaaagtgttgggattataggcgtgagttatagcgtttggttaaaatgtttttatgtttattttttttagtatgaaattttagcgtattaaagagtattgagaacggttgatttggtaaatcgttataaaggcggtatttttttttttttttttttttttttttttttggcgaagtgggggatggagttttattttgtcgtttaagttggagtgtagtagtgtgatttcggtttattgtaagtttcgttttttaggtttaagttatttttttgttttagttttttaagtagttgggattataggcgttcgttattacgtttagttaattttttgtatttttagtagagatagggttttattgtgttggttaggttggtttcgaatttttgattttatgattcgttcgtttcggttttttaaaatgttgggattagaggcgtgagttatcgcgttaggtttaaagggggtatttttaatattggagaaaggtgaattttttttttttttttttttcgagatagagtttcgttgtgttatttaggttggagtgtaatggcgtaattttagtttgttataattttcgtttttcgggtttaagtaatttttttgttttagttttttgagtagttgggtatttgttattatgtttagttaatttttgtatttttgtagagatgggggttttatcgtgttggttaggttggttttaaatttttgttttgatttgaggtgatttatttattttagttttttaaagtgttgggattataggtatgagttattgtgtttgattaggtgaattattttataaataatattggaatatttggtttatttagggaaaaataagagttttattttatatttaattaaaaagtaaattttagtagattaaatatttgaatatgataggaaggtatatattaaatttatgggatagatggtttggggaggaatgaaatttggaaggcggtattacggtaaattatttttatttgtgatgattttatttttttaaaataaattatattataaatatgatagtatattaataaattttgtggtaggaatggggttgtgtattgtattatattttgtatttttgagagttttttaattttttttttgttgttgttgagatagagttttattttgttatttaggttggagtttagtcgcgtaattttggtttattgtaatttttgtttttcgggtttaagtagttttttgttttagttttttaagtagttgggattataggtattcgttattacgttaggttaatttttgtatttttagtggagacggggttttattattttggttagattggttttgaatttttgattttatgatttatttattttgggtttttagagtgttgggattataggtatgagttatcgcgtttggtcgagttttttaatttttaaaaataaaaatgagtatatatttaaagtagtagaagaaaatgtagagaatgttttataattttaaaatagagtttttttaagagtgaagtgaaataaaaagttagaaaataatatattgatatagatttaattatatgaaaattttaggtcgggtgcgatagtttatatttgtaattttatattttgggatgttaaggtaggtagattatttgagttaggagtttaagattagtttgaataatatagtgagatttggtttgtataaaaaatataaaattagttaggcgtggtggtacgtggttgtcgttttgtagttttagttatttaggaggttgaggtgggaggatcgtttgagtttaggtggggtagagtttgtagtgagtaagattatgttatcgtattgtagtttgggtaatagggtgagattttgttttaaaaagaaaaaaaaagtttttttaaagatagatagaagaaaatgtttgtaatatgtataatatatatagtatatagaatttttatattaatatatataatttttaaagaaaaagtggataaagaatatgagtaatttatttataaaaaatataaatagttaaaagatatgaaaaagaaaaaaatattgttaataaaataattttttaatttatttaattggtaaaattaaaagggttgatgatatttaattttggtaaaggaagatataggtatatttgtatattggtataaatttattgagagtagtttgattaaattgcgtatgttttttgatttagaaattttatttatgaaaatttatttttatagaaagattgtaagatatttatgaggttgaatattttttgaaataaagtttatcgatattggggtaaggagatttgttttgtatatatagtggaatattaattataaagtcgttaaaaagtatgaggtagattgtatatatttttgtggaaaaatataaatgagatgttaaatgaaagaagtaagttgttaagtaatatttgtagtatggttatatatttttaaataaatgtgttatatgtatgtttttaggtatattaaggtgggattggaagggattatagtatattgttaatagttattaaatttgttcgtttttttttaaaaagaaaattttaatttaattatattttttttatattaaaatgttaaataaaattgggggaaaagttatttatagttttattatttataggttagaatttttatatattttttgttagtttattttttttttttttttttttttttttttgagatgggagtttttttttgttgtttaggttggagtgtattggtatgattttagtttattgtaatttttgttttttaggtttaagtgatttttttgatttagttttttaagtagttgggattataggtatatgttattacgtttggttaatttttgtatttttagtagagatagggttttattatgttggttaggttggtttcgaatttttgattttaggtgatttattcgttttagttttttaaagtgttgggattataggttatgagttattacgttcggtttttttttttttaattataggatttggttttttgttttagatagttattatttgatttttttttttttttttttttttttttttttttttttttttgagatagagttttattttgttatttaggttggaatgtagaggcgcgatttcggtttattgtaattttcgttttttaggtttaagtagttttttgttttaattttttaagtagttgggattataggcgttagttattacgtttggttaattttatatataatataaaatataattatatatatattttgtttgtttgttttagtaaagacgggtttttattattttggttaggttggtattgaatttttgattttgtgatttattgttttttttttttagttttttaaagtgttgggattataggcgtgagttatcgtgtttggttatatttgattttttttatagttttgtagttagttttttttaaatatatgttttagttgtagtggttgtttaatattatgtttttatagttggaggttttattttttaaaatttatgaatgtaaattttttatgtaagtttgagtatttattatgtttattatttgagtttaggtggggaataagcgaatgagagataggattaggtattttttgggtgggataagttgagagggtttgtgataggttatagtagtattagggagaagtgtttttttttattaattttgatgtgatttgggtagggatggtgggttttcgttagttatatttgggttattttgtttttttgtttttttggttttgtttttttttattttagttttttgttaggtaaatagtattttttagtattattaaataaagatttaaggattgttagtttatttttttttatttcggggaaagaaagtaggtttataggaaggaaggttgttttttttttttttttttattttttaagtgaaagaggtggttggtggttatagtaggtgggtttggttaggatgtttgggttggtagtgaaggaagtagtatggtatttagttaattttgggttagatgtagtaaggttgggattgaagaaaaggggagtttaggaacgtcggttttttttttgtttttttttagtttatgggtgagattttttgttatattttatttttttttttttgttttaggttagtagttatttggaaagagtttgttttgtcgtcggttatagttgttgtcggtttatttttttattttttttttattattttttggtaaggttggttgagagaaatttttttgaaaatatttattttatttagtttattgataagtgataataaaagataagtattatatatttgtgtatttattaatggtttagagtagagtatttagatatttttttagtttgatatatggttttaggtgagaaaataagggatttatatagtgataatatttttaagtgaaaagtggaatatatagttaaagaatttgggtattgttttggtggttggaggtaggttagaaaatgttagttggtatggtagaatttttaggatgttgaaatagtttgtggagatataagtaagaattttttttttttttttttgagacggagttttgttttgttatttaggttggagtgtagtggtacgatttcggtttattataagttttatttttcgggtttatattatttttttgttttagtttgtcgagtagttgggattgtaggcgttcgttattaggtttggttaattttttgtattttttagtagagatgggattttattatgttagttaggatggtcgtgattttttgatttcgtgattcgttcgtttcggatttttaaagtgttgggattataggcgtgagttatcgcgtttggtcgagaatattttaaattattatatttattatgtatgtggtaaattattagtttgtatttattagtgatggttattttttaatatttaggaggtatttatgtgagttatttttttattgttttaagattaagggagtgagtgattagtaggatttaagatggtagttttgtcgaggagtgggagttttagttaatttttgttttttgtttttttattaatagtttatatcgatttttttttttcgttgttaagtcgttgttttttcgttatgggaataaagaataaggatggggagatttttggttaaattttgggttggggatttttttgggattttgttgaagaggaggaagaagatgatgtttttaaggagcgggaatggagatagaagttttagggtgagttggaggacgagtggtaggaagttatggggaggtttgaaggtgagaagtttattgttatttatagttgtttttttttattggttgttttttatttgtatgaatgcgttatattaggtttttttgtttttttttttgtgtttttttgttttttggggtttattatttttttatagtttttttttaattatttttattttatttttttaaataggtgatgttttttatgaaatttaggaatttgagttttttttagtttggttagatcgtttggttcgggaatatgtttagaagtgttagtagtagtagcgagaagtagagggattttgtcgatttttacgtgttgagggttttagttagagttggcgatagtaggaggaggagtagcggttttttagggagcgagttcgggttaaggaggaagagttgcgtgagagtcgagttaggagggcgtaggaggttttaggggatcgagaatttaagttaattagggtcgggtttagggaagagtattttagaggagcggggaggggtagtttttggcgatttggtgatgtgttttggttttgttttgggggaggggatttagaggttatggttgtagttttggtggttaggggtttttttttggaggaatagggggttttgaggaggtatttgagggtttagtaggttcgttggtattttgatcgttttttgtagcgatttcgaagttagattgagatttgggagttgggtcgtgtgatgggagtagtgatagtttttttttaggttttgaatcgttatgtagaggtttttaagtgattttagggaagaagtaagaaatttcggggttgtagttttaggatgaggtagaaggaagggtaagggaaaggatggggattataaggaagagttaggtgttgtttagtagaggatatgggtgggagcgaaagttgtaataagtgggggtggggggtgcgggtcgttattattgttttttgattttgtcgttttttaataagatttggttttatattttatttttagtgttttttttgtttttttttattgttgtggtttttattatttatgatattttttttttcgtttcgtttgttgaaatttatagtttttatatatttgtaatatatacgtatacgttaatacgggttttgagttggaggtaagaagtttttgtatgtttttttagtttagttttaagaaggtttagtttgttatttagttttattttattttttatattggggttttgtttattttgtaatttgtggttggagaaatagatgcgaatagaggtaaaaaggggaataaaattagttttttttttttttttggttttttaagttgaattatatttttttttttatttaatattttttttttttaatatagggttttttttttgttgagttattgaatgagcgagttgggggtagtcggcgttggggggttatgaggaggttgggggaggatggggaatataagtagaatggttggaggaagagttttgtgggggagtggaattttagttgttaaaattaggagtaggggaaggaggtggaaagagtaaaattatgtaatatgggttgtttgtttttgggtaattggagttttatatttaaagttagttaggttgttggttttatttatttttgttttttagtttgttagttgtatttttttttttttagggttttaatttttattttcgttatttagttgttgttttattttaaatttgagtttatttttgggtagtttaggtatggttttttttataaatatttttttttttaagaattagtagttgaagttttgagaggtggagggagagtttgggatttttacggaggagagaggggggttttttggaaattaagataggtagattttattattatcgtttaggatataattgggaatttggtaaaaagaaaggatagggttgtaaggagagtatagatatgtgttggtgagtgtattgtttgtatagttatattagagtattttattaattagaaatttattttttaggttttgagtttagttttttataggagaattttaggagtggaagtggaaggtagtagaagatagggagggtacgtttttgggaatacgggaatatgggtgggtatgagatttttgaataagatagtttgaagttcggaagagattaaggtttttgaaggattaggtagatgtttagggtgtaggagggggaagggttggtgagaaagattttgtgagaggaagttgttgtgatttagagaagagattttaagttgtgtgtgattttggcgttcggttttttttataggttggagtttttcggaagtggtatgtaaagagtttaggtttggttttggggggagttggggttaggatttttaagttggaggttgagaagtaaattatagaaaattttggtgattaaatttgtttttttatttaggagattttttattggtttttaagtatattatttttttttttgtaagagttatataaaattaaagtaaaataagttttgaaatttgggtttatcggattatagtttttttaacgtttttttttggtgtttggtttttagttttggtgggggtttttttgagataagggttgtttattttttttgattatatggttttcgtttttgtgttttttgttttttaggttgataaaaatattgagttttagaggttttggttttttttgattttttggggtaggtagtaggtattttgtttagtatggtgggggtagggataggggttagggatttttaaggggtgatttagtgtttgttatgaaatagtgggtaggtggaagtgtatttttgttttttagagttggtattaggagttgagttttagtggaggatgtattgggatttaattggaggaataggtttggaaaagaataatgagattgaagagggttagtttgaggatttaggttggggtaggtttggattaagttaggaaaaggatttgggagggattttgtttagtgtaggttaattgagtattatgtagtttaaagataaatttaaattttgttttaagtttataatttagtggggaggtagatttatatttagttaattgatttaaggtatgatgagtaaattttaagatgattatagaaagaggggagattaagtttatttgaaagtatttagggagtttttgaggagatagtatttgaatttgttttaatgaatgggtttattaggtggaggtggatggaaaggttttataggcgaataatacgttttgagcgagtttgataagttagaaaatgtagtatgttttgggaaaggagcgttttgagggagaagaagtataggtgtgagggaatatgtgatgaagaaaggattatagaaagttaaggttagagattggattgtattttgtgggtagtggtttaggtgacgatgaaaaagagggagaataggtgagtgttgtagtatagataaggagtaagaaaacggttattattttgtgaattaatatttattgtgtgttaattagttttttttttaatattataaatttttttaacgtttgtttaaaaggtgggtggtggtggttaggtattttatttttgtaattatagtattttgggaggttaaggtgggagtattttgggaggattatttgaggttaggagttcgagattagtttggttaatatggtgaaatttcgtttttattaaaaatataaaaattagttgggtgtggttttgggtatttgtaattttagttatttaggtatttgaggtataagaattatttgaattcgggaggtagaggttgtagtgagttgagattatgtttttgttttttagtttgggtgatagagtaagattttgtatttaaaaaaaaaaaaaattattaagtatttattaggagtagggtattgtttgataataggtataaataataaagttattgtttttatagaatttgtagtttaatgagatagtatataaataataattatatattatagttataatgtataggtatgtttgtttagggtaataaagtgtttaatgaaggtttgaggtattagtatgatttttaggtggagatttttagaaagtaggtttggagtttaagagaagttgggtttggaggaatagatttgggtattattttttttttagtagaggttgagtttttgagtggataggatttttaagggagggggcggagtgattagaagagttttgagtatgattaaaggaagagaattaataaaggagaggttggggagtagttagagaagtagggtacggggggcgggggatgttaagtagagatagggtagttatgtttgaggttttaaagaggtttagtaaatgagggttgaaaagattgttgggtttaggaattagacgattataaattttgagaaaatcgtttttatttaatagaggggtagaaattattttatataggttgaggaatgagtgggaggtgaggaaaaggaggtggtgggtatgaggttagaatggtgaatatagaataattgagaattattttttagttttatttatagattttatagttgagggaaattttattagtttttgaaaaagtggttcgttaagggggttagttttttgagatattatacgaaaacggaaggtgagatagattggatatttgagggagaaatattttaaggaaggattttttttgttgtttatttttaagaaataaaattgaaggtaaaatgaagatgtttaaagagataaagataggttaggtgtagtggtttatatttgtaattttagtattgtgggaggttaaggtgggtagattatttgaggttaggggtttaagattagtatggttaatatggtaaaatcgtatttttacgaaagatataaaaattagttaggcgtggtggtatatgtttgtggttttagttatttattgaggtgggagaatcgtttgaatttaggaggtagagggtgtagtgagtcgagattatattattgtattttagtttgggtgatagagcgagatttagttttaaaaaaaaaaaaaaaaaaagtttaggtgcggtggtttatttttgtaattttagcgttttgggaggttgaggtgggtagattatagatattaggagtttaaaattaatttagttaatatagtgaaatgttgtttttattaaaaatataaaaattagttgggcgtggtggtatacgtttgtaattttagttatttaggaggttgaggtaggagaattatttgaattcgagaggtagaggttgtagtgagtcgagatcgcgttattgtattttagtttgggtaatagagtaagtttattttaaaaataaataagaaagggagagatagtgaaaatataagtaagaagtggggagagaatatagtaaagatagaggaagtgggatagagtatagataaaaggattagttttggaaataagaaaaagtattgtgagttagtatgtaaggaaagattaaatataataaaattaaggaaaaagagggaagtgagatttatatttgatggttttaagtttaatgaaatattaatagatgagagtgaagaatattagaggtacggagatttagaatattacgtatagtagtataatggggagttaataaagaatgagtaaaagttgtgtttaagaatattgatgattttttgagattagttggttaggattagttataggttttttatggtgatttagttgtttattgtagcgtttggtagtttaagataaagttttaagaatgagattatttagtttatttaagttaatttttgagatagagttttatttttgttgtttaggttggagtgtaatggtttaattttggttttttgtaatttttgtttttcgggtttaagcgattttttttttttagtttttagagtagttgggattatagttgtttattattacgtttagttaatttttgtatttttagtagagatggggttttattatattggtcgggttggtttcgaatttttgattttaggtgattcgtttattttggttttttaaagtgttgggattataggtgtgagttacggtgttcggcggtaagagattttaaaatgtagataaagtggagttgaaattgttgattatgtagtatatgttaaattaataagtaaaattaggaaagtagaagtagtcggaagttttggtaagaataaagaattgatttaaggggaggtagagagtgggagatgtgaaaagtgagtggttgtgatgagaagggtaatttagagattaagattttgaaggtataatttttttaagtgatgttggggtttgaggtataattttatttttgggtggttaaaatggaggagggaagaagaggttgtaaaattagtagatttgagaaatttggagaattgagaggttagattgtaagatttatttgatttgtgtggtttttttttttatttttattttttttttttgagacgaagtttcgttttgttatttaggttggagtgtagtggtgtgatttgggtttattgtaagattcgtttttcgggttaatgttattttttcgttttagtttttcgagtagttggggttataggtatttattattacgtttagttaattttgtttttgtatttttagtagagacggggttttattttgttagttaggatggtttcgattttttgatttcgtgagttattcgttttagttttttaaagtgttgggattataagtgtgagttattgcgtttagtcgatttttgtggtttttaaagttattaaagatggtggtaggaggtcgggtgcggtgggttatgtttgtaattttagtattttgggaggttgaggcgggtggattgtttgagtttaggagtttaagattagtttaggtaatatagtaaaattttatttttggaaaaaaaaaaaaaatataaaatttagtcgggtacggtggtatgcgtttgtagttttagttatttaggaggttgacgtgggaggattatttgagtttaggaggtcgaggttgtagtgagttaagattacgttattgtattttagtttgggtgatagagtaatattttgttttaaaaaataaataaataaggatgatggtagggataagatgtggagaaagattgagttagttatataagttgttaagagtataataaatattttgatggataagattgtgttgtgaagataggaagagtatggtaaatgtaaaaggtacgtgttttgggagatgaggaggagtttattagtggtttgggggagagaaaataacgattttttttttttgtttttatttttttagtgatggaggtcgaagaaagagtaatttttattatagagaggagtagtattattaggggaaagttaggttttaaaatgtttagaggaaaatgtttttaaatatagaagataggatttgaaaatgtgaagagttttattaaatattgtgaaatggattggtagaagggtttttgtggggtagggaattgaatttagggaggttaaattttagtgggaatttagaagattaagtttggagagtttagtttttaggagtaggaggttgttgtttttggaatttagaatggaagatgtattgtatttattgtgaggggaaataagtgttttaaaggggttttatagggatgtataagataagttttatggttttaaatattatttttatgttgattatgtttaggtttttttttttagtttggattttgtttttgaaatttagatgtgtatttgtttagtgatatttttatttgtatgtttaatagatttagatttattatatttaaaatagaattttttagtttttttatttattagaattttgttttttttttagtatttatattttttatttattaatttattatttagttttgttgtttttatttttggaatgtataatatattttaaatttgtttatttttttttatttttatggttgttattattttttttttattattaatgttattgttatttgttttttattagttagtttaaatataggagttatagtgattttttaaaaataagtttaggttgggcgcgttggttatgtttataattttagtattttgggaggtcgaggtgggtggattacgaggttaggagtttaagattagtttgtttaatatgatgaaattttatttttattaaaaatattaaaattagttaggtacggtggcgtatgtttgtaattttagttattcggggggtcgaggtaagagaatcgtttgaatttgggaggtggaagttgtagtgagttaagattatgtcgtagtattttaatttgggtaatagagcgagacgttattttaaaaaaaaaaaaaagtttaggtaaggtttagtggtttatgtttgtaattttaatattgcgaggttaaggtgtaaggattgtttgaggttaagagttgaaggttgtagtgagttatgatggtgttattgtattttaatttgggtagaaaagtgagattttattttttagaaaaaaaaaattaggtcgggtgtagtggtatatgtttgtaattttagtatttcgggaggttgaggtaggcggattatttgaggttaggagtttaagattagtttggttaatatggtgtattttttatattaaaagtataaaaattagttaggtatggtgatatgtatttataattttagttatttgggagattgatataggtggattgtttaaatttgggaggtagaggttgtagtgagtcgagattgtgttattgtattttagtttgggtgatagagcgattttgttttaaaagaaaaaaaaaaaaaaaggttgggtgcggtgttttacgtttgtaattttagtattttgggaggtcgacgtaagtggattatttgaggttaggagttcgagattagtttggttaagatggtgtattttttttattaaaagtataaaaattagttaggtatggtggtatgtatttataattttagttatttaggaggttaagataggagaatcgtttgaattcgggtagtagaggttgtagtgagttgagattacgttattgtattttagtttgggtaatagagtgagatttcgtttttaaaaaaaagaaagaaaaaaaatttagggttagtgtggtgatttatgtttgtaattttaaaattttgggaggttggtttagtatggtggtttatatttgtaattttaaaattttgggaggttgaggtaggcggattatttgaggttaggagtttgagattagtttgattaatatggtgaaattttatttttattaaatataaaaaattagtcgggaatggtggtatgtatttgtaattttagttatttgggaggttgaagtaggagaatcgtttgaatttaggaggtagaggttgtagtgagatgagattagttattgtattttagtttgggtaacgagcgaaatcgttttttaaattaataaaaaaaaattttgggaggttaagatgggtagattatttgaaattaggagttcgagattagtttgagtagtatagattttgttttaataaaaattttaaaatattttttaaaattagttaggtatagtggtatatatttgtagttttagatatttgggaagttgaggtggaaggatgatttgagtttatggttttgaggttgtagtgggttatgatggtgttattgtattttagtttaggttatagagtaagatattatgttaaaagaaaaaaaaatttaattatttttgtttatttttttttttttttttttttttttttttttttttttttttttttttttgtaatatatatatatatatatatatatacgtacgtattatatattttgacgatttttaaaggttttttgtggttggatgaaatttagaggttttattttttttgtatggttttgtatgatttggtttttgtttttttttttgattttattttttattcgttttttagtttttttttttgttttagttatattggttttttgtttgtcgttaatatttttagtttggtttcgttttttagtttttgtagtagttgttttttttatttgaaatgttttgtttttaaatttttatttggttattattttttgttatttgggttttagttttagtgttatttaaatatttaaagaggattttgttgattattgtatttaaaagtagttttttgttatttttataatattagtttgttttatttttttatagtattaattttttttttagtttttttttttttcgtttggttttattggaatataagttttataggtgttggtattttttttgatttttttgtttttatgttttttttgttttaggataatgtttagtatgtgttaggtacgtagatatttattaaatggaggaatggatgaataatttataaagtaggataaagtttaattttaggtttgtggtttagattggatttatatttagagttagatttaagtttagtgttaggagtggtggtaaattggttttaagattagttttagaaatagggttgggttggggtagaggagaagttttatttagggggttattaattgggatgtgtttagatttgaggttagggttatagttggggttgagtttgagttgtgatttgggttgaggttaaatttgggttagggttgatgttggtattaaattttaatttaggttttgaggttaagtttaagtttgaagttaatgttattttagttttatttggaggttttagagattttattagtttttttataaagattattataaagattgtatttttttgagtttggggtataagattttagttattagtttttttatttagggaaagttttaaattaattgttggtttgtttaagaaagaaattaaatttatataattttcgaaattgagattgaaattaagattggtttattttaaggagtatttttcgtatattttatatgtacgtgatattgagttttagtttagttttattttttttttttttgtgttttttatgtttttttattattttttttgtttttttttttttgttttttaatgttttattttttttttttaatttaaatttttttttgtgttttattgttaattgtaatatttttttttgtttgtttgttttgttttgttttgttttttggttggtttgtttgaaatggagttttattttgttgtttaggttggagggtagtggtacgatttcggtttattgtaattttcgttttttgggtttaagtagtttttttgttttagtttttttagtagttaggattataggcgcgtgttattatgttcggttaattttttgtatttttagtagtgatggagttttatcgtattagttaggattgtttttattttttgattttgtgatttgttcgttttagttttttaaagtgttgggatgataggtatgtgttattgtttttggttttgtaataatattttatattttaatatagtttagttggggttttagtttattagtttatattattagagaagtagaaagagataataggaagtaaaaaggattttgagagaaagggtaatatagagaaaaagaaaggagtaggggttaaaagggaaatttatattgatataagagataataaggttaaaagaatgagaagaaggttgggcgtagtggtttacgtttataattttagtattttgggaggttaaggttggtgggttatttgtggttaggaatttaagattaatttggttaatatggtgagatttcgtttttattaaaaatataaaaaaaaatttggcgggtttggtggcgtgtgtttgtaattttagttattcgggaggttgaggtaggagaatagtttgaatttgggaggtagaggttgtagtgagttaagatcgtgttattgtattttagtttgtgcgatagtgagaaattgttttaaaaaaaaaaaaaggaaaagaaattttttgatttattttatttgatagtaggttataagatttttattttagaagaggttttgttttatatttgggaggaaggaatgttgtatagagagattaagaagaatatggttaggttttgttgggatttttttagttttagtttgtgattattagatgatattttttttgtttaattatatttttgtatagttgtttattttttattaaatttaagtataaaaatagtttttttttgggtttttgggtttttatttttgaaggtttttatgttatttaaaattttgattaaataaatgtattatgttttttttttgttaatttgttttttattataggagtattggttataatttttatgatgggttaggaagggattatttttttttgtttttatagaaataatagttaagattagtaaagtataaaaggtaaaggggtaggtttttaagtagagaagaataggagaaatagtttatatatatttagaatgttatttatatgtttttttatgttatattaagattttttagggattttgtgtttggggagagaagtggtttgttttatgtaatagtgggttttatttcgggttattattagttttagttttaatttttttaatattttttaagtaaaattatattagtagtagtaataatatttgaggtgataagttggtattattttaaatttaggaaaagtgaataaagttatttttagaaattgttttttttaaattttgtaatttgtaagttaagtgaaaatgggtttatgtatgagaatgttcgtgttagatattttttgtgttagataaaaattagaaataaattaaatttttattaatagaatatattagaatatattgatataatagaatattatattataatttttttaaaaaatattattgatatatataattacgtatatgaattttataaatataatgttgattgaaagaagttaaatagaaatgagtatattttgtgtgattttatttatatgatgttttaaattaggaggaaataatttatggtgataaaagtgagagagtggttggttatttttggagggtattagtagggagggggtatgagggaatttgttggggatttgaaaatacgtggagttgggtggtggttatatatagatggaaaaatttattagttgtatatttaagaggtgtttattttatatttaagttatatattaataaaaaggaaaaaaattttggaaatttttttttttttttttgagatagagttttgttttgttttttaggttggaatatagtggtgcgattttgatttattgtagttttcgttttttaggtttaaataattttttagttttagtttttcgagtagttgggattgtagatgcgtattagtacgtttggttaatttttgtatttattatagagatggggttttattatgttggttagttggttttaaatttttgattttaagtaattcgtttattttagatttttaaagtgttaggattataggtgtgagttattgtattaggtttggaataattttaaaataatgtattggttttgtaaatgtagttttagaataagttttttagttgtttttattttattttaagttattatttttaagttttatttatgtggaattttgaaattttttttgtagaaaattttggaaggtgtttgttatattgattttggaatgtgtgtttatttggggttatataaatttgttttgtggaagttatttgaagttaggaagagatggagggtattttttaggagtgagatgagattttattatatttgattgtttagtattatttttgagtaaggggattaaaaaatttattttttaaattaggatatttttaagagtggaagggggatttattaatatttttatttggataagaggtaaatattagaatgttttcgatgaaggggatatataatggatttttttgatgtgaaatttgttagatgggttggaaagttcgtatattgggataagtatgatttgagttgtttgggataaggataggggtataagagaaggaaatgggtaaagagagaagtttgtatttagttaagggtgtagagatgttatatatgattgttttttagggaatcgggtttttagtttatattttagttgtttaatcgttttttttttgaattgattgttttttttttggaattttaggtttgattttattttttggtttttttagtttacgatttttttgattcgatttttttttttagaatttagtcgtttgaatttttagtttgtggtttttttttaggttttagttttttttgtttttgattgaaatagtagtattttttaagttttgggggttttttcgggttttagtttcgatttagaattcgttcgttgtttgttacgttgttattgtcgttttttttataaagggatttgagcgttcgggtttaggggttttatatagtaggtgaggtttttttgttttatttttttgggttgttcgtgtttcgtgttttggattatcgtttcgtagtgttttgttttttgtttgggtttcggttttttttgtatttgttgtttggattttcggtttgtttgggtttgggttttggtgggtttggttttggtttttttttttgtttttgattttttatttgttagttttattgtttttgttatatattttttgtttttgttatggtttttttttgttttttttttgtttttttttgtttttttttgtttattttggggtttttttgattgtattttgtttttttttttgtcgatttttttttcgggggtcggggggtgttgttttttagggcgggaggtttgtttttcgtcgcgtgtttcgtttcgtttattgtttttttttttttttttttttttttgtaggttttttttatgatattatttgaacgttttttttttttaagggtgtgtggtattattttatattttttttttttggggttgttgttggttttgttgtttggggtttaggtgaggtagtaggagaatgggggttgttggggtggtttagttaaattttgagttttagagttttttttaattttgtttttttttaggggttttttggtgttggttttatatttttagttgtttagattgttcgttagtattttaagatgtattttgtttatagtaattttaaatttgttgtttattttattggtaaatatttatttgattttttagatatgtttttattagttttttttttatttttgttttaggaatttaagtatttattttttttttttaattttttttacgttaaaaaaaatagagggagtttatttttatgtttttttttgttattttttaggaatttagttgtttagtgtttatttttttagggattgagatttttgatttagatttttgattttttatttttattttttatggttttttttaggagattttagtaagtagaatttattgttttggagagtaaatacggatcgtgtttttttttaggatggtttttttttgagtaataatttttttttggtttttattagtggtatttatttcgtttatttttaggtggttttttttgggaaagtttatttttttaaggttattttttttttattttatttggtttatgaggtttagtttttttttttttagtattttttttatgtgtttttttttagtttttagaagatggtgtatttagggttgtaggaattttggttgtattcgatgtattacggggttgcgttttagtttatttagggagattagttatttatttatatagatggtattttttatttagtttttagttttagtattgttttttttggagttttcgttttgtagaatttggaaaaatttagaaagaaaaaataattgattttaagattttttttttattttgtttttattttgattattttaggggtcgttattattttttttttggttattttaatagtttaagttttttttgattaagttatcggagtttttaaagaaggaattttaggtattttaggggattatatttttttgaattatttttgatgtttgtttggttgaggattttaagtttgtttaggaatttttagtttaaagttgttggtttgttttattagttaggtggggtttagatttatatatagaggaagagtaggtatatggaggagtttgggggatgattagaggtagggaggggattatttatgaaggtaaaaaaattaaattatttatttatggaggatggagagaggggaataatagaagaatatttaaggagaaatagagataggtttaagagatgaagagtgagagggtatgcgtataaggttgattaagagagaaagaagtaggtatgagggattatagggttttagaaggtagggaaaggttttgaaagttagttgtcgattagagttttatacggaggtatttgtattttcgatgaagtttaataaattttttttttttgaaatgttgtttgtttgtgtgtgtgtgtttgggagtgagaattttttagtttatttaaggaatggagggagggatagagggtttaaagggagtaagagttgtggggagaataaaaggataagggtttagagagttttagggatatgtgatggatttattaggtgaggtcgttagattgttgtaggggaagtaaaggagaagttgagaagatgaaggaaaagttagggtttggaggggcgggggttagggagtttttgggagatatggttatatgtagcggttttgaggaatgggttataggagatttttggggagatgtgattatagtaatgggtaggagaatgtttagggttatggaagtcgagtatggggatttttttttaacgaagatagggttatgtagagggttttagggagtgaaagagtttttaggatttttaggtatggaatataggggacgtttaagaagatatggttatatattggggttttgagaagtgagagttttatgaaaaaaattagggattttagagttttttggaagttaagattgaaattagtattatgagttttcgggttagaatgaaagaagaaggtttgttttagtggggtttgtgaattttcgggggtgattttatttttcggggttgttttaggtttgtttttgttatttttatttagttttttttgaggttttaagtttgttattaagtttttagtttttttttttcgtagggatttaaatataggttttaggatttaatatagtttttttttttaatttcgtttttttttttttaaggatttagttttttgaagttttttttagttttagttttattttttttttgtattttgtttggaagttagaaggaaatagattatagatttggtttttaaaagaaatggaggtaataggttttgaggggtatggggacggggtttagtttttagggttttatatataaattagttagtggtttagaagatttttttcggaatcggagtagggaggatggggagtgtgaggggtatttttgatgtttgtgtgtttttaattttttaaattttcgttttcgcgatggagaagaaatcgagatagaaggtgtagggtttattatcgttttttttagatgagtttatgggtttttttattaaggaagtttttcgttggttgaatgatttttttttcgtttttttttcgttttagggatatataaaggtagttgttggtatatttagttagtagacgtttttttagtaaggatagtagaggattagttaagagggagagaagtaattatagattttttttgaaaataatttttagacgttatattttttgataagttgttaggtaggtttttttttttttatatattgatttacggttttatttttttttttttggaaaggatattatgagtattgaaagtatgattcgggacgtggagttggtcgaggaggcgttttttaagaagataggggggttttagggttttaggcggtgtttgttttttagtttttttttttttttgatcgtggtaggcgttattacgtttttttgtttgttgtattttggagtgatcggtttttagagggaagaggtgagtgtttggttagtttttatttatttttttatttaaggggaaatggagacgtaagagagggagagagatgggatgggtgaaagatgtgcgttgatagggagggatggagagaaaaaaacgtggagaaagacggggatgtagaaagagatgtggtaagagatggggaagagagagagagaaagatggagagataggatgtttggtatatggaaggtgtttattaagtgtgtatggagtgaatgaatgaatgaatgaatgaataagtagatatataaataagatatggagatagatgtggggtgtgagaagagagatgggggaagaaataagtgatatgaataaagatggtgagatagaaagagcgggaaatatgatagttaaggagagagatgggggagataaggagagaagaagatagggtgtttggtatatagaagatatttagggaaagagttgttgaatgtttggaaggtgaatatatagatgaatggagagagaaaattagatattttagggttaagagcgtaggttagataggtagttagttgttttttttttaagggtgattttttcgatgttaattattttttttttttttaatagttttttagggatttttttttaattagttttttggtttaggtagttagtaagtgtttttaaattttttttttaattttgggtttgggtttgggggtagggttagtatcggtatggaagtagtgggggaaatttaaagttttggttttgggggaggatggatggaggtgaaagtaggggggtattttttaggaagtttaagggttttagttttttttttttttttttttttttaggattattttttcgaatttcgagtgataagtttgtagtttatgttgtaggtaagagttttgaggatgtgttttggaatttggagggttaggatttggggattgaagttcggttgatggtaggtagaatttggagataatgtgagaaggattcgttgagtttaagggaagggtggaggaatagtataggttttagtgggatatttagaacgttatggttaggtgggatgtgggatgatagatagagaggataggaatcggatgtggggtgggtagagttcgagggttaggatgtggagagtgaatcgatatggttatattgatttttttttttttttttttttttttttagtaaatttttaagttgaggggtagttttagtggttgaatcgtcgggttaatgtttttttggttaatggcgtggagttgagagataattagttggtggtgttattagagggtttgtattttatttatttttaggttttttttaagggttaaggttgtttttttatttatgtgttttttatttatattattagtcgtatcgtcgttttttattagattaaggttaattttttttttgttattaagagtttttgttagagggagattttagagggggttgaggttaagttttggtatgagtttatttatttgggaggggttttttagttggagaagggtgatcgatttagcgttgagattaatcggttcgattatttcgattttgtcgagtttgggtaggtttattttgggattattgttttgtgaggaggacgaatatttaatttttttaaacgttttttttgttttaatttttttattatttttttttttagatatttttaattttttttggtttaaaaagagaattgggggtttagggtcggaatttaagtttagaattttaagtaataagattattatttcgaaatttgggatttaggaatgtgtggtttgtatagtgaagtgttggtaattattaagaatttaaattggggtttttagaatttattggggtttatagttttgatttttgatatttggaatttggagattagggagtttttggttttggttagaatgttgtaggatttgagaagattttatttagaaattgatataagtggattttaggtttttttttttttagatgtttttagatttttttgagatacggagtttagttttttttatggagttagttttttttatttatgtttgtatttgtgattatttattatttatttattatttatttatttatagatgaatgtatttatttgggagatcggggtattttgggggatttaatgtaggagttgttttggtttagatatgtttttcgtgaaaacggagttgaataataggttgtttttatgtagttttttggtttttgtgtttttttttgattatgttttttaaaatatttatttgattaagttgtttaaataatgttgatttggtgattaattgttatttattgttgagtttttgttttttaggggagttgtgtttgtaatcgttttattatttagtggcgagaaataaagtttgtttagaaaagaaatatggttttttttttggaattaattttgtatttgtttttttttgtgggtgggaagaagttttttaagttttttttttataggttttaagatttttcggatttagttttatttttagatttttagggttttggagattttatataaataaagtttaatagaatattttttattttttaggaaataagagtttgaatttaattattttttttttagggtatgggaatttttaattttgggaattttaatttttgttgggaaaattttgtagtttaggtgagattttcggttgttgtagttggttagtagttcggagagagttggagaggagtcgtatttttaggtatttgaattatatagttaagggatttttagagattcgggtgtttaggttttaaattattttgttttaattttgtaatttgaattagttatttaatttatttatttaatggggataggaatgtttattatatatagggtatgtgagagaaggtttgatttttattagaggattttatttagtttttggtatagtgggtatttagtgaattttggttttttttaattagtttttagttgttttatttttttttatttttttagtgggtgaaatcgaagagattgaggataataaagaataaggaatcgaattgtcggacgtggtggtatgtatttgtaattttattattttgtaaggttaaggtgagaggatcgtttgaatttaggagttttagagtaatttgggtaatatagtgagattttgtttttattttttaaaaaagaatgaaatataggaataagatgtgggtgaaggatttatatgtcggtttggttttattggtttttgtggtgaaggaggggagaggtgagaggtgggtaattcggaaagagaaaagtattttttttttggatgaaggtttttttggagagagttaaagataaataagggtggggcgtagtggtttatgtttgttattttaatattttgggaggttgaggtgggaggattatttgagtttattagtttaagattagtttgtgtaatatagtaagattttgtttttagaaaaaaaattaaagattagttaggtgtagtggtgtatgtttgtaattttagttttttaggaggttgaggtaggaggattatttaagtttaggagtttgaggttatagtaagttatgattatgttattgtattttcgtttgggtgatagaacgagattttgttttaaaaaaataataattttaaaaataaatatggagacggaaattgagtttttttagattgggagtttttattgagttcggaaattaggttttatttttagttttggggtgttaggtaggagaaaattatgtggtaggttgagggggtagggtgatttattggggtgatttagatagggttttgggttattttttgttttttttagtttgtggttgaaagttagttatgaagtaatgggggatattgttatttattttagaagtatttatatttatttatttttgggaagggggatttaaagtgtgaaaaaaaggtgaggatttttcgttttattttaaatgggatattttaagtggggtatcggtttttttttttttttagaattttttggtgtttttaggtattataggtttttttttgttatttttatttttttttaatatttttttttttttttttttttagttttttttttttagattttatgagttttgaattaagttttttggaggagaagagttgattgtcgggtaggagatagagaggtttttaggtagttttagggggagaagtgcggggtttttttaggttttatttttttgttatgataggggtttattttgttgttgggtttttttgagtggtgtttgttgggttttgtaatgattttttttattgttggggggtatttaagagaaaagagtatggtgtagagtttggttgggattatgtggttttgaaaattaggatgtttagagaagtttcggagtttgagaagttttttttttttttattttttaattgggttaatggtggggtttggttatttagaggtagggagggggtgggataggtagattattatttttaggagtaaaggttatatattgtgttgtgatgaattgttttaagtaattagaagagtattgagaatatttaattcgtattcgtgtatttattttgaattaagacgtgtgtcgtaatttagtatttttatcggtagtattgaagttttttattttttatttttattaggtttaaaattaatttttaaatagttttttatattttttttattgttatggggttttgggcgttcgggtttttaatatttacgtattcgtattacgtatttatatttttttattttattattacggttttaaagaaggttttttttttcgcgaagtttattatatcggggtgattgatgttgacgtatattttttcgttttttcggagttgtattaggtcgtcgaattttacgttcgtgtattagagaggttcgtatttttgttttttggtcgggtttagtattggagttatcgtttcggcgttttcgagtagtagttcgggagtgttcggttcgtaggcgtttttcgttcggtatagagagttgcgtagcgtgatcgagcggttttgggggttttcgtcgttagggggcgttcggtttcggtagtcgacgagatagtagaggtaatagaggtcgttttgcgggagcgttagtttttcggcgttcgagaattgcgtttcgttcgttagaaacgtttgttttttcgtcgttttttagtttagtttttgtttttttagcggagcgtttgcggagatacgggtcgacgcgtttttgggaatgcgattttaaaggtttgggatttttggggaagtggcggtttttagtttttgcgggagtcgagtcgggtcgggggaggagggatggtgttgtttttgggatgagtgcgagttgggggtcgagggaatacggatgtggggtgtagaacgttgtagtggggatttttaggtcggtttttgtttgtatcggagggaagaagaaattatattgcggggacgagcgtaagagtgggtacgagcgataaaaggtcgtgaagcgggtgggaaatcgagtattggaattatggagtcgaaggattttgggcgagtagaattggaattttcggattatttatatttttatttaggttttggaggtttttatttatgaggtgggtagttgggagttcggggttgagatttgtttttggttttttttttggtagtttttgaaattttggaaggggtaaagagtttacgattgggggtagggtagttatttatgtaggttatttttgagagaatagggcgtagggatggggagtttggatttttagaggaagaggtatttggggacgtagtagggagttgggagtttttgagggtttgaagcggggaaggagagatagtttgtttttatttagtttttgttgggtttgtgtttcggggtcggtcgttttcgttatttggttgggtggggttatagtgtttagagtttagatttagtttatgttatttttatttttttgaaagtggatttaagttgtaggtttggggttttttttattagtattatttttaatatatatttttttagaagggagaataagtaaggtataggtatttgggcggagaaatagatgtatttcgggaagaggagaggagatataaggggtttatgtcgggatataagtataatattataggaatatggaaagagagttagtaaagagataagatatttttattagggatagtcgagttagttgagttagagggggtaaaagattataggtataattagagggagttaagtattcgtaagatataattttttattagggtttgttgtagttatttattagttttttttgattttggggtattaaggttagtatagttaggatagtgataggtatcgttagtaataaggttattagagaagtggtttttgttatagttagtaggagggaattttttttttggagttttttatttttgttttttagttttagtgtttttattgagattgaattagagttagagtagggggtttttatattttagggacgggtttattttttttttgtagatttgtatatttggttgggatttttcgtatatttttgttttttttatttagttttttgtttatttagagttggggtggggtagttggatgtttgggttttttgaattggggaagaagttgaggttagggagataggtttttagggtggaattaaaggggtttttagatattttttggtttagtagagagagaaattgaggtttagggagggaaggtagtttgtaggaagttagttagtagagttgaaatgagaatatagatttttaggtttttaatgtggtttgtatttttttatatttttaaggtaggtgttggaggaagagttgatttcgtttttgaggttaagggtcggattaggataaggattggaattttgagggatggatgtttgggttttttgagaagaattgatttttatattgggttgattttttttcgtttttttgtttatttttagttttttgtgttgagtgagaaagggagaggtaagttttagttttattattgattattgatttattaaggagggatggaaatggagttttattttttttgttataaaaagtaaagatagatggacgaggtatatttttatttttagagagtttttaagtttataatgagttttatttattagtaggtgtttattaaatgtttatatataaatgaataaaaggataaataaatgtaggaataattaaaataaagtagtaaggattatatgaatggtagatgtaggtagtatgagtggttaagagttaagggagtagtcggggtagtggtttatatttgtaattttaatagtttgggaggttgaggtaggtggattatttgaggttaggagttcgagattagtttggttaatatggtgaaattttgtttttattaaagatataaaaagttagtcgggcgtggtggtacgcgtttgtaattttagttatataggaggttgaggtaggagaattatttaaatttgggaggtagaggttgtagtgagttaagattgtattattgtattttagtttgggtaataggttgagatttttttttaaaaaaaaaaaaaaaaaaaaaaaaaaagagttaagggaagaaagattaggtttaaggaagttggaagtggttttaattattttttttttttggtaatatttttatgtgttttcgtaatattaataataatatagttgatttataaaatgtatttaatatgtttatgttattgatttatatattttaataatttttttttttgagatagggtttcgttatgttatttagattggaatgtaatggtaggattatggtttattgtagttttgattttttaggatttatggatttatttattttagttttttgaatagttgggattataggtatatgttattatgtttagttaatttttgtattttttgtagagatggatttttgttatattgtttaggttgggtttaaatttttggatttacgtgatttgttcgtgttggttttttaaagtgttgggattataagtatgagttattatgtttagttaataattataattttgataaaaattttaagaggaaattgaggtatagagaggttaagaaatttatggagtttatagagttagtggtagaattagaatttgaatttaggtatttggttttagagttttgataataagatagtttaaaaattgaatattggggttgggcgtagtggtttttgtttataatattagtattttgggaggttaaggaaggtggattatttgaggtaaggagttcgagagtagtttgattaatatggtgaaattttatttttattaaaaatataaaaattagcggggcgtggtggtaggtatttttaattttagttatttgggaggttgaggtaggagaattatttgaatttaggaggcggaagttgtagtgagtcgaaattatgttattgtattttagtttgggtgataagaataagattttgttttaaaaataaaaataaataaataaaatagtattaggttaggcgagatggtttatatttataattttagtattttaggagattaaggtaggtggattatttgaggttaagagtttgagattagtttggttaatatggtgaaattttttttttattaaaaatataaaaattagttggatatggtggtataaatttgtagttttagttatttgggaggttgagataggagaatcgtttgtatttagaaggtagaggttgtagtgagttaagattatattattggattttagtttgggtaatagagtaagatttcgttttaaaaaaaaaaaagagtattgatttgagatttgtatgtaaaatttgttttttttaggttagaaaagaaatggggaaataaatattgaattttagttaatgttaagtttttgaagggtttagatgtaaaatgtattgatatttgtaattttaaaagatatttaaaagtgagatggattgataaatatgtgataaagtaaataaaaaatgttaatagagttaggtgtagtggtttatttttgtaattttagtattttggaaggttaaggtggaaagattgtttgagattaggagtttaaaattagtttgggtaatatagtaagattttatttttataaagttttatgtggtagttggtgtttgtagttttagttatttagaaggttaaggtgggaggatttttgagtttaggaatttaaggttgtagtgagttatgattttattattgtattttaggttgagtgatagagtgagattttattttaaaaataaaataaaataaaaaatgttaatagtagtatttaggtggtaagaatatgtttattgtataattatttttattttattttatgtttgtattttttaataataaaatgtaaaaaaaataaaataaataaataaaaaattttgaatattatttagtatggggaatatggaggatggggagaagggtgggggaggaagtagaaggtttttgaatttggaaggggaaacgtaaattaatatggatttatttaggtattatattttttttttattttttgttttataggcgttttttagtttttattttttttaaggagtgggtgtgtaattttttagtatttatttttttttttattatagtgttattaagaagtttttatttaggtttttttagagagttttaggtcgttgtttttatttagttttgtgtttaatgttagaatgttgttttttataggaagtttatttgtattgtttatatttttttttttgttattaatttgttattaattttttgtttttgatttatttatagggtttatgtagatttagtatggttgtttttaatttttatgtttgttaattagatagttaagtagtttgttgtatagagttgtagaatattaagtgggttattagaatattaaatatgttagagtttttagtttgaattggagtagggtatatgtgtttatagatatatgttaagattaagaggttttaatagatgtagtgtaagaggtaatagagaagagttaattaaggaagatatttgaaggtggtgggtgtttgttgattagtggtaggattagtgaaatgattggagttgaggtagattatggttttagttataggtttagaagtttgaaaagaaagatgttgtaattttaattttggagtcgaatttttttttttaataatgttggggaggaatttaggttgggggagaagttaaagttagaggaggggtaggaatgtttgaggtggtaatatttttttttagttagatagtattggttagtttggagtttgtttattttgtaggttataagttttgggtaagttgggaatgggtagggattttggtggaaggatggttatattttagagtggggtgaagttaagatgaggggagggagagtatgggtttgagtttttttgggtcgtcgaggaattttttgagtttttgttttttaaagaaattaaagataatttatttttgtgtttacggtttttatggtttttatttgtatttttgttttttattttttagaattttttttaaatttagaagggttttagtttttagattttagttagtatatttggttttggggtgaagagaacggttttttttttatttttaaataggaattagtggttggaggggaggaagtgtttgaggggaagttatggggttttagatatttttttatgttttattttagttttagtagtatttgtttgtgggaagtagttttttatattagttaagggggtttttatattttcgcgttgttttgcggtttagggagtagtttatttgttgggtgtgttgatattattttttttttttttttttagtgtttatatttatttaggtttaggtttttttttttttattatttttttattagtatttagaattatttagggttgaaaagttttttttaaattacgtggttagtttagggtagaggaaagggttgggttttggagttgggtagagttggttttaaattttagttttatttttttgggatgggtgatttagtaaagtttaggtttgaatttcgggtttttatttgggtaacgggtattatgatattttatgttttggggattagtagtgaggaatggaaagtgtttagtttagggttggtatataagggaggttttttagtttgggaacgattataatagagggttttttattttatagatgaggaatttgaggtaagttattagtttttgattatttcgtttaaaagagtaaggattagagtttttgatttttaggttagtttttgatttttgatttaatgttatcgcggaatgatggtaagtaaagtgttttttgtatttgtatagagagggttttgggagtttaggaagtgatggggaatagtgatgtatgtagtttatgattaggtggataggtttttggggatagttggtataggagggaaagggattttacgggaggtttagaaatttggtaagaggtgaggtattaaggtttgggatggagaagttttgagggtatatttttttgtttttaaaattgttggagagggaatttgagaaagttgtaattaattaggaggttggggtacgttggagaaggaatgggttttataattttgagtttttttttttgaagatatatgtatttacgggggtttggggttgggcgggtttttgtttttggtagtggtttttttgttcgtttgtttgtgttggttgtatcgaagaggtgagcgttgtattttttttttttttttgtagtagtgttttttgtgtttttatttttatacgtttttttattgtttttttagaatattgtttggttttggagttattgggaagttaataggggagtttacgtttgttggtggggggagttcgggagggttcgggagaagtataaagggtgggttgtgttgagttttttttttttttttagtaaagaggttggagaggagttgggtgagtttggggatagggaagggggagggtaagagagattttgagtgggtgagtggggagaagtatggttgagcgttgagaggagggttggggacgggagataaggagagagaaagtaggagtatgagagaggtagagaaaatcgaggtaaaagagaaagagaaaatgagatagaaattaagagaaaaagtgagatagaggataggagagatagggagaaaatgagagtgagagagatataaagagaagagtaatgaaagagagagagagagagaggttttagaattaggtatagtggtttacgtttgttattttagttatcgtaaggttgaggtaggaagatagtttgagtttaggggttgaagataattttggataatatagtgggattttgtttttaaagaaaaaagagagagagagagagagagagagggagagagagagagagagagagagggagagaagtaagaaaggttggaggtgggagtagaatttatagggaaggatttgacggtatcgttttttattagtattttttgttttggttttaggtttagggttttttagagtaggaattttattatgtatttttgtagaggttgttagtgtttagtagtgagggatttgattttaggggtagagataagagaggtattaaggaggatttaagagttgattatgtttgtattgttgagaataaatttatttgagtattttagatattttttttaatttaggcgggtggatagggtttttttgtggtttagttagtaaaaattatggtttttttatttttgtgttttagtttttttagtttatttcgagttttcgtttaaattgattattattaaaatttatgtggttttttgatttttgaatagggaattttttaaattttttaaaaattaaaataaaaaaaatatatggtttatttttttatttattttggggttaaatagtaatttattgggtgaatgatagtgtttagggatttaagtttttttaatagttagaagagggtatgtgtgggtttggtaggaaagggtagttgttaaggaggagttatatttgattttttttattttttaggataattaggtttagttttttgggattgggggaagtagatgtgttgagtttttatatggtggtgggaggggcgttgggattatagtcggtagttgtttttttggatttttttaggttagatttggtggaagggaaagtttagagttgggggaattcggagagagtagatttggtatttggagaatggagaagaaaatatttgagatttatgaggagttagtggtggggtagatttattggggttttttgaagaggattagggatatttgggttttggaattatttttcggggtttatttgaggagtggtagtgtgtttttatgtgatagtggtttggttagagagaggataggagttgtttagtgttgtagtttcgaggtttttttttttttggtttttgttttttttttttttatttttttattgttttttttatttcgtttattattgtttttggttttattatttatatttgttttggtaatagacggtgttgtttacggttatagagagaaagttgatagtatagaatttagttcgaaggaggaggattgtattagtttttagttgaggatgttttgtatggggtaatggagacgggggttggggaagaagtgtatataggtttagggagggaaggggttttagaggagtatttttgttttttaaggatattgttttttggggtttttagttaggaggagatattattttttagtattttatttttttttattattagtcgagttttattttttgtttcgatattaaggtttagtatttttattttgtatacgtagatgttggcgttatggtttcgtacgtttcggatgtgtagtttagtttggtggttatggaggaaacgggaagaagtaagtggggttaggcggtttttgaattttggggttttattttttatttttttttttggaattattttatttcggaattacgtgacggagttaatggttagttttttttggttggtattgaaggagtagggtaggaaggtagaggatttttttagggtacgaattttagggggttgggatatttagagagtataggattttgggggtagaaggaagatttagagaaatatttttttagttattttaaagagaaaagataatagagtttggagtagaatattttagttttttttaggtatagggtgtatgggaatagatattttggggttttattaaattttttttttttaattaatttgattttttaatattgtttattaaattatttttcggttgggtgtagtggtttacgtttgtaattttagtattttgggaggtcgaggtgggcggattattaggttaggagatcgagattattttggttaatatggtgaaatttcgtttttattaaaaaaatataaaaattagtcgggtatggtggtgtgtatttgtaattttagttattcgggaggttgaggtaggagaatcgtttgaattcgggaggtagaggttgtagtgagttaagattgcgttattgtattttagtttgggcgataaagtaagattttattttaaaaaataaaaaataaaaattattttttaaattttttttatattaatttttatttttattttttgttattattttttagttagtttagtagtaatttgtttagttgaaatgtaaattattatggtgaaattaagtttattaatgaatgtagttgtttagttaattaatattatttattatattatttaggtattattttagtataaatggtattgtatagtaagttatttttttttttttttttttttttttttttgagatggggttttgttttgttgtttaggttggaatgtagtggtgtaattttggtttattgtaaatttcgttttttgggtttaagcgattttggtgttttagttttttaagtagttgggattataggtatttattattacgattggttaatttttgtatttttagtcgagatagggttttattatttggttttaaatttttgattttaagtgatttatttatttcggattaggttggttttaaatttttgattttaagtgatttatttgtttcggttttttaaagtgtatttagttatttttggttttcgttaaagaaagtaattaattaaatttttaggtgaagacgtggttttaattggttgagatttttatttaattcgtttatgttgatgaattaaattaaatattaaaatttttgattaaattatttatttagggaaatttataagttattttattttagtggtttttaaatttgagtgtgtatggaaattatttggagtatttgttagaatagatttttgggtttagtaggtttggagtggggtttaagaatttgttttaggtttttagaaatttatattttgagaatttttgtatttagttaataatatgtttgatagttaaggttttttagtttattaaaaatagtttcggtcgggtgtagtggtttacgtttataattttaatattttgggaggttaaggcgagtggattatttgaggttaggagtttgagattagtttggttaatatggtgaaatttcgtttttattaaaaatatataagttagttagtagtaatggtatgtatttgtaattttagttatttgggaggttgagataggagaattatttttatttaggaggtggaggttgtagtgagttgagatatcgttattgtattttagattggataatagaatgaaattgttttaaaaaaaaagttttattattaggcgggcgtagtggtttatgtttataattttagtaatttgggagatcgaggtaggtagattatttgagattaggagtttgagattaatttggttaatatagtaaaattttatttttattaaaaatataaaaatggttgggcgtagtggtttaggtttgtaattttcgtattttaggaggtcgaggtaggtagattatttgaggttaggagtttaagattagttcggttaatatggtaaaattttgtttttattaaaaatataaaaattagttgggtgtggtggtgcgcgtttgtaattttagttatttaggaggttgaggtaggagaattgtttgaatttaggaggtagaggttgtagtgagttaagattatgttattgtattttagtttaggtgatagagtaagatttcgttttaaaaaaaaaaaaaattagttaggtgtggtcgtgcgtgcgtgtagttttagttatttaggaggttgaggtaggagaattatttgaatatgggaggtagaggttgtagtgagttaaaatcgtattacggtattttagttaggcgatagagcgagatttagttttaaaaaaaaaaaaaaaaaagttttattaagaaatttattatagatttatttggattttttaaattaaaaagttttatagtgggtgatatagagagattgtgaattgggggagtttattgagtgttatttttggagtagttttattttttttttagagtcgtgtgttttagtttttattaagttcgttttttatagtatttagtttagttttttggatttttttttttttatttatattttttggggttttgagcgtacgttttgttatttggatggattatgattaagatgagtaatagtatttaggttatgtcggaagatgttttagttggcgaaggggatttgagtagtgaggtttgggtggaggaggaaggatttattatttgtagttaggtttttggttattagatggggatggggagttttttatgatatacgggatttatatattatttgttaaggattataattgttagggatttcgagtattaaatgtttgtttttttgaggagagaggatagatgttgttggaggagatgttagggtttttaggaggttaaggggttagtttgtggtaggttagttaagcgtgtgagggggagggtggggtttagatggttgttaatttaagggtgagtgggcggttgggcgggtgagattaggatgtgggtttttttatttttcgaggtttaaggagattagtttttatttagaataagtttgtaggagttttttttggtttagaagttaatttatttattttttttgttgtttattagtatttagatttattttatttattttttttttggaatttggttttattgtattttagggttattttaagatttttatgagggattaggagaagtaagttgattggtgaagttatatttaatttgtatagtaattattttgtgtgtgtgtgtgtgtgtgtgtgtgtgtgtgtgtgtgtgtgtgtgtgtgtttggttgggtttttttgttttttgttttttttttgagttggagttttattttgtcgtttaggttggaatgtagtggtataatttcggtttattgtaatttttgttttttgggtttaagtaatttttttgttttagttttttaagtagttgggattataggcgtatattattaagtttagttaaattttgtattttttgtagagatagggttttattatgttggttaggttggtttttaatttttgattttaagtgatttattagtttcgtttttttaaagtgttgggatttttgttttggttttttgagatagggtttggttttgttttatttaggttggagtttagtggcgttattacggtttattgtagttttaatttttagggtttagttgatttttttattttagttttttgagtagttgggattgtaggcgtatattattatattaggttaatttttgtattttttgtagagatggggtttttttgtgttgtttaggtcggtatttaatttttgggtttaaataatttatttatttaggttttttaaagtgtatgagttattatgtttggcgaaatgtattttttaaataatgagatttgaaagtttaaattattttttaaattatggattataggatggatgttatgttagtaggtaggaaaataatatttagttgggcgtggtggtttatgtttgtaattttagtattttgggaggttgaggtgggaggattatttgaggttaggagttcgagattagtttgattaatatagagaaatttcgtttttattaaaaatataaaattagtcgggtgtggtggggcgtatttgtaattttagttattcgggaggttgaggtaggagaattatttgaatttaggaggcggaagttgtagtgagttgatatcgtattattgtattttagtttgggtaataagagcgaaatttcgttttaaaaaaaaaaaaaaaagaaaaagaaaataatattcgtttttttggatatttttattagagtttttggataattatgtatattgttaatgagtagtaattattttaaagaaattttgtttttcggagtagtagattttaatagtaggtttaaaatatttagtaaattagcggggtatagtggtttatatttgtaattttagtattttgggaggttaaggtgagaggacggtttgaggttaggggtttgagattagtttgggtaatatggtaagattttgtttttataaaaaaatttaaatttagttggatatagtggtatatatttatagtattagttatttaggaagttgaggaaggaggattttttgagtttaggagttttaaggatgtagtgagttatgattttgttattgtattttagtttgagtaatggagggagattttgtttttaaataaaatataatttaaattgggaatagtagtaaatggagtttaaaaaaaaataattttggttaggtatggtgggttatatttgtaattttagtattttgggaagtttaggagggtagattatttgagttaaagagttggaggttaggttaggtatggtggtttatgtttgtaattttagtattttgggaggttgaggtgggcggattacgagtttaggagatcgagattattttggttaatacggtgaaattttatttttattaaaaatataaaaaattagttgggtgtggtggtatttgtttgtagttttagttatttaggaggttgaggtaggagaattatttgaattttggaggtagaggttgtagttagtcgagattgcgttattgtattttagtttgggtgatagagtaagattttgttttaaaaaaaaaaaaaaaaaaaaaagagttggagattagtttggataatttgacgaaattttatttttataaaaaatataaaaattagttgagtatagtggtttatgtttgtggttttaattatttaggaggttgaggtaggaggattatttgattttggaaggtagaggttttaatgagttgagattatgttgttgtattatagtttgggtaatatattgagatcgtgttttaaaaataaataaataaataaaaaaaagaaaaattttaaaattagtaaattacgttgtaaatagatgtattattatttaggtttttatttatttatttatttatttatatatttttttgagatggagttttgttttgttatttaggttggagtgtagtggtgtaattttagtttattgtaattttcgttttttgggtttaagtgatttttttgttttagtttttttagtatttgggattataggtgattgttattatattcggttaatttttgtatttttagtagagatagggtttgattattttggttaggttggttttgaatttttgattttaggtgattcgtttattttagttttttaaagtgttgggattataggtatgagttattatatttagttatttaggttttattgttttatttatatagcgtggtagagtaaatttagttaatttttgttaagtgtagtggtatgtgtttatgtttttgttatttagaaggttgaggtggaaggattatttgaggatagaagtttaagattgtagtatgttacgattttgtttgtgaaagttatggttttatggtattttagtttgggtaatagagtaagattttttttttttttttttttttttgagataaggttttattttgttgtttaggttagagtgtagtggtataattacggtttattgtagttttaattttatgggtttatattatttttttattttagttttttgagtagttgttatatattattatgtttagataatttttgtattttttgtagagatagggttttattatgttgtttaggttggttttaaatttttgggtttaagtgatttgtttattcgattttttaaagtattgggattataagtatgagttattgcgtttggttaattttagttttataaaaaagaaaaaaaaagtttaggtatagtggttgatttttgttattttagtattttgggaggttaaggagggtagattatttgaggtcgttagtttaagattaatttgattaatatggagaaatttcgtttttattaaaaatataaaattagtcgggcgtggtggcgtatgtcggtaattttagttattcgggaggcggaggtaggagaattattgggagacggaggtagtggtgaattgggatcgtgttattgtattttagtttgggtaataagaataaaattttgtttaaataaataaatagataaaattagttaggtgtgttggtgtgttttagtagttttagttatttgggaggttgaagtaggagaattatttgagtttaggatttcgaggttgtagtgagttatgattttgttattgtattttagtttgaatgatagggtgagattttgttttaaaaaaaaaaaattattattgatagattataatagataaaataattaagaaaaagtttgaaatattgtaagaattattaaaatgtgttattgagatataaagtgagtataggttattggaaaagtggtatttatagatttgtttaatatagggttgttataaattttaatatataaaaaaatgtatatttgtggaatataataaaataaggtaatatttttatagggattggtataagagtatgttagatatttttgtatgtgtattatatagttataggagataatatagtatatagaagtgaaggatgatatgtaatatgttatgtgtttattttttatcgtatgtttttttttggttttttttattattatattttttagagataagggttttattttattatttaagtaggaatatagtggtgtgattattgtttattgtagtttcgattttttggatttaagtaatttttttgttttagttttttaagtagtttggaatattggtatgtgttattatatttgattttttatttttatttatttttgaaagatagtattttgttatgttgtttaggttttaaatttttggtttggttttttttatttattttatttatttatttattttgagatggagttttgtttttgttgtttaggttggagtgtaatggtttaattttagtttattgtaatttttgtttttcgggtttaagcgatttttttgttttcgtttttcgagtagttgggagtatagacgtgcgttattatatttagttaatttttgtatttttagtagagattgagttttattatgttggttaggttggttttaaatttttgattttgtgattcgttcgttttggttttttaaagtgttgggattataggcgtgagttatcgcgtttagtttggtttattttatatgaatatatgttgttgttgttgttgttgttgttgtgagatagtttcgtttagtcgtttaggttggagtgtagtggtataattttggtttattgtaatttttgttttttaggtttaagcgatttacgtgttttagtttttcgagtatttgggtttataggcgtgtgttattatattcggttaatttttgtgtttttagtattgacggagttttgttatgttggttaggttggttttaaatatttggttttaagtgatttattcgttttggttttttaaagtgttgggattataggtgtgagttattatatttgatttaatatatgtttttttttttgtatttgtgtttttagttttgtgttatagtatttttgtagattgtttagtttttatttattattgaagtaatttagagtttttttttggagaagtagttattttatggttaagaatgttggtttggaatgagtttaggtttaaatgttagttttttcgtaatttttataattatgttatataatttttttttttttttgagatagggttttattttgttaattattttggagtgtagcggtgtgattatatgattatagtttttcgtggttttgaattttgaatttttgagtttaagtgatttttttacgttagtttttagagtatttgggattatagatatatattattacgtttggtttatttatttttattttttgtatagatagagttttatcgtgttgtttaggttgatttaaaatttttggtttaaagtaatttttttatttcggttttttaaagtgttgggattataggtgtgagttattgtgtttagtttaattttgaataaattattttatttttttaagttatcggaataattatatatgttatataatttgggaaggattaatttagttattttttagtagcgaagtggttgttattttagggatatttaattagaggatgtgggatggaggcgttatggtaaggtaaggtttgttttttggtggttagagagtatgggaggttcgagttattaatggtggttttttttaattgggttttgattttagtttttgttcgattttttattttgtttgtttttttttattaatattttatttatattttaaaggattaatataggaaaaattgtttttattattttagttgtaagaagtttacggtttggggagggagaagaggttattattagtggggacgtggaataagtaattggttggggataaaattttattttttcggtcgggagtagtggtttacgtttgtaattttagtattttgggtggtcgaggtgggtagattatttgaggtcgggagttcgagattagtttggttaatatggtgaatttttatttttattaaaaatataaaatttagttagacgtggtggtgcgtgtttgtaattttagttatttgggtggttgaggtacgagaattatttgaatttaggaggcggaggttgtagtgagttaatattgtgttattgtattttagtttgggtaacgagtaaaatttcgttttaaaaaaaaaaaaaaataaattttatttttttatagtgtatatttaattatatggttttattttacgttttaaggtaatgtggtttagaagataaattagtttaggttggagttttggtgttattattgtaaattgggggtattatttgtaaatttttagattttattgttttaggtgtttaatgtgtggtttttttttagtgtttttttcgttttgtgtaagggtggtagtgttattgttatatttggatttaagggtattttgtttttttagtttttttttatatttaagatttttaaatatttgttatagttaaaaatgttttagattttaaagatagtatgtgggtttttttttttagtttatttagaataaattttgatatgtgtgtatatttaagggattttttttaataattttgagaatttttagggaaggttaatttgtaagataggaattgttgcgttaattagtatagtgggtataagaatggaattttttttttttttttttttttttgagatagagttttgttttgttatttaggttagagtgtagtggtgcgatttcggtttattgtaattttcgtttttcgggtttaagagatttttttgttttagttttttgagtagttaggattataggtatttattattatgtttagttaatttttatatttttagtagagacggggttttattattttggttaggttggttttgaatttttgatttcgtgatttatttacgtcggttttttaaagtgttgggattataggcgtgagttattgtatttattttggttaaggatggaatttttttaaagaaattatttttaggtatttaagaggaaaggtaataaataaaatagtgttgaagtggatgtgtattggtttttgtttttgtgtgtgttttttttgtttttttttttttgagagggagtttcgttttgtcgtttaggttggagtgtagtggtgtgattttcgtttattgtaatttttgtttttcgggtttaagcgatttttttgttttagttttttaagtagttgggattatagcgtttgttattatgtttggttaatttttttgtatttttattagagatagggttttattatgttggttaggttggttttgaatttttgattttaagtgatttatttgttttagttttttaaagtgttaggattataggcgtgagtcgtcgtatttagtttttggtttgatttttttaataataagttgtgggttggttggatgtagttgaggttaataaatttttaatttagattatgaaaataggtgaaaatataaaagtttataatttagtataggtgattttattttttttttatttttattagggtttttttacgtgttggtaggggtgagattgagtgatttttttggttaagttttattaatattttttaattaatgaatggtttttaggtgatgatatttttagtttttgagaatagttttttttttgaggtttatagtatttgattttacgatttttaatttttttttggtgtcgtttattcgtttttatatttattaagagtttatttttgattttgtagttttttttttatttatttttttttttttttttttttttttttttttttttttttgagatagagttttgttgttgttgttggagtgtaatggcgtgattttggtttatcgtaatttttgttttttaggtttaagcgatttttttgttttagtttttagagtagttgggattataggtatttgttattatgttaggttaatttttgtatttttagtagagaaaaggttttattatgttagttaggttggtttcgaattttagattttgtgattcgtttatttcggttttttaaagtgttgggattataggcgtgagttattatgtttagtttattttttttttattttaatttttgttaattttttaatggatttaatgtttatatgaatgattttttttttttttttttttgagagagagttttgttttgttatttaggttggagtgtagtggcgtgatttcggttttttgtaagttttattttttgggtttacgttatttttttgttttagtttttttagtagttgggattataggtattagttattatatttggttaatttttttgtattttttagtagagatagggttttattatgttagttaggatggttttaattttttgatttcgtgatttatttgtttcggttttttaaagtgttgggattataggcgtgagttatcgtgtttagttataaatgatatttttaaatattgatatataattttatatagtaaaatgtatagattttaatgtatagtttgatgatttttggttaatatgtatatttatgtaattatattgtaatagagatatagataatttttattattttggaaaatttttttatgtttttttttggtaaatttttttttttttttagatgtaattattttattatttttaatttttgtagattttttttttgggatagagttttgttttgttatttaggttggaatgtagtagtgtaattatagtttattgttgttttgattttttgggtttaagttatttttttattttagttttttgagtagttacgattataggtatatgttatcgtatttagttaattttttaatagtttttttgtaggttgggtgtagtggtttaggtttataattttagtattttgggaggtcgaggtagggggattataaggttaggagtttaagattatgttggttaatatagtgaaattttatttttattaaaaatataaaaaaaaaaaaaaaaaattagtcgggcgtggtggtatatgtttatagttttagttattcgggaggttgaggtaggagaattgtttgaatttgggaggtagaggttgtagtgagtcgagatcgcgttattgtattttagttcgggtgatagagtaagattttgttttaaaaaaaaaaaaaaaatttttttttgtagagacgaggtttttttatgttgtttagattggattttaatttttgggtttaagtgatttttttgttttgatttttttaagtgttgggattataggtttgagttattgcgttcggtttttatagattagtttgtttttgaatattatattaatggagttatatagtatatatttttgtatttggttttttttattttgtttaatgtttgtgagattcgtttacgttgttgtatgtattagtgttttattttttttttttgttgagtggtaattttttatatgatgtagtatagtttgttgatttatttatttgatgaagtataattgggttgtttttattttttgttttttttattatggtttaatttgttatgaaattttttgtatttatttcgtaaatgtttttttaatattttaagtgtgtaattttatagttattttattttgtttattttaattattattttgattttttatgatttatattttagattttgttattatggaagttgttttattttgaaattttatttttttttttttaaggatataaaagttatttaatttgagttttttagatttttgtattttaaacgtgtgtttttatattattgttttgttggaaaatttttgggttgttttttttatttttttttttttttttttttgagatagaattttgtttttgttgtttaggttggagtgtaatggtgcgatttcggtttattgtaattttcgttttttgcgtttaagtgatttttttgttttagttttttaagtagttgggattataggtatgtgttattatatttagttaattttgtatttttggtagagatggggttttattatgtcggttaggttggtttcgaatttttgattttaagtgattcgtttgtttcggttttttaaagtgttgggattataggtatgagttagtatttttggttttattttttttttaaaaagtgttattatatattttttattatatatatttttgagatgagattttattatgttgtttaggttagttttaaagttttgatttcgggttttaggtgttttttcgattttagttttttacgtagttgggattataggtatgtatttggttttttatttttatttaataaattttgcgtatttattatggtttttttaggtaattttgttatagttatagttgttattattgtttattttttgttaagtttttaatttatattttttttttaggttttttttttgagatttaagtttatattatttaattgttttttaggcggtttattttgaatattttataggtattttaaagttattagtgtttatttagattaggttagttttttgttatttttgttttagtgaatggaaatataaagttttagttatttaaggtaaatatttgggatttattttattttgtttttttttttagtttttttatttaaaagatttttaggttttgtttattttgtttttgaaagatcgtaggtgttttttttttgttttttattttattggttgttaaattttttattaatttaaggggaaacgagtagagttgtttttttgatgggtagtgtggtttttgtatagtattttttttattttattattgttgggtattgaggtttatttatttatttagtattgttttttacgagggttttttatgggttagatattttatttttattttttttaatcgttttttttagtatttttttttttattttttatattttttatagttttgtttataattttttttgttttattatgttatttatattatttgttttttttttcgtgtttatttaaacgttatatttttatatatttttatttttttgtttttttgttatatgtatatatatttttgtttatttatttatttaataaatatttagcgagtattttttacgtgagatattttattttttttttttttttttttttgcgtttttagtttattgtaatttttattttttaggtttaaatgatttttttgttttagtttttagagtagttgggattataggtatatgttattatttttggttaatttttgtatttttagtagagatggggttttgttatgttggttaggttggttttgaatttttggttttaagtgatttatttgttttagttttttaaagtgttgggattataggtgtgagttgtcgtgtttggtttgttttttcgtttttttttttttttgtttttttttattttttttcgtattattttttgtttttttattattttttatgttttttttttttatttttttttatttatatattttatttttttattttattttttttttttttttatttttttttgggtgagagaatgaaggaaggttagtgattagttattttttttttttaggggttagagtttaggtttgttttagttttgttaggttggttggtattatttttgtttgtttttggagtttttgtataaggatgtttaaaaaaaaaagtttaggttaggtatagtggttatcgtttgtaattttaatattttgggaggtcgaggagggtggattacgaggttaggagttcgagattagtttgattaatatggtgaaatttcgtttttattaaaaatataaaaagtagttaggcgtggtagtatgtatttgtaattttagttatttaagagaagaatcgtttgaatttaggaggtagaggttgtagtgggttaaaattacgttattgtattttagtttgggcgatagagtgagattttattttaaaaaaaaaaaaaaatttgtgtagtagcgatagaaaagtaatttataatattagaggaagatttatattttttagaaattatatattaagtaggtaaaaatattattaaagataacgggtgcggtggtttatgtttgtaatcgtagtattttgggaggttgaggagggtggattacgaggttaggaggttaaggttattttggttaatacggtgaagttttatttttattgaaaatataaaaaattagttaggcgtggtggtatgtatttgtagttttagttattagggaggttgaggtaggagaatcgtttgaatttgggaggtggaggttgtattgagttgatattattttattgtattttagtttgggtgatagagcgagattttattttaaaaataaaataaaataaataaaatatacgtatatataaaggtgggagtgttatgtaagagaattgtaggggatatttttatttttaggtttaaaggggtgaggggagagagaggttatagtagtggtttttagttattttgtgttatagatttttttggtattttagtaaagtataaaatttaaaaaatatatatataaaaataaatcggttaggcgtagtggtttacgtttgtaattttaatattttgggaggtcgaggtaggtggattatttaaggttaggagttcgagagtagtttggttaatatgataaaattttgtttttattaaaaataaaaaattagttaggtatggtggtcggcgtttgtaattttaattatttgggaggttgaggtaggagaattgttggaatcgggaggcggaggttgtagtgagtcgagattacgttattgtattttagtttgggtgatagagtaagatttcgttttaaaaaaaaaaaattgtatcgaaattaaattttagttattaaaatattaataaaaatttttaatagagtaaattgaaattgttttaagattgataagaattgtatgttgggatttgggtagaaatatagttataattaagtataaattaggttgtattttggtttattgttttatttttgtaagtttttagattttgattatttgtattttcgttgtgttaatattaggatgagaatgtttttatattatgatttattgtttttatatttaaaaaaaaaaaaaaaaagaagttaggtacggtgatttacgtttgtaattttgatattttgggaggttgaggagggcggattacgaggttaagaaatttagattattttggttaatatggtaaaattttgtttttattaaatatataaaaaaattagttgggtttggtggcgcgtatttgtagttttagttatttaggaggttgaggcgggagaattttttgaatttatgaggtagaggttgtagtgagttaagattatgttattgtattttagtttgggtgataaagtaagattttatttaaaaaaaaaaaaaaaaaagattagtattgtggtttacgtttgtaattttagtattttgggaggttaaggtgggtagattacgaggttaagagtttgagattagtttgggtaatatagtgaaattttatttttattaaaaatataaaaaaataatggtatgaatttaggaagtggagtttgtagtaagttgagattttgttattgtatattagtttgggcgatagagcgagatttcgttttaaaaaaaaaaaaaaattgttggacgtggtggcgggtgtttgtaattttagttatttgggaggttgaggtaggggtattatttgaattcggaaggtggaggttgtagtgagtcgagatcgcgttattgtatattagttcgggcgatagtgtgagattttgttttaaaaaaaaaaaaaaaaagataattagttattatggttgggtgtagtggtttatgtttgtaattttagtattttaggagggtaaggtaggtggattatttgaggttaggagttcgagattagttagagttaatatgatgaaatttttttttttttaaaaaatataaaatttagttgggcgtggtggcgggcgtttgtaattttagttatttcggaggttgaggtaggagaattgtttgaatttaggaggaggaggttgtagtgagttgagattatgttattgtattttagtttgggtgatagagagagattttattttaaaaaaaaaaaaaaaaaaaatttaaggcgtggtggtatatgtttgtcgttttagttatttaggaggttagggtgggaggattatttgagtttggaggttgaggttgtagtgagttatgattatgttattgtattttaggttgggtaatagaataagacgttgatttaaaaggaagaaaagaaagagaagaaaagtttatttgggtatgatgatgatttttaatattttttttttggtggttgatttggttatttgataagatttttaggtaggaggttttaagataattgtattttttttgtaaagaagtttttttagttagataaggaaattttagaaagtgtggtaggataattttaaggtagtttttaaggttttttagtattttaaagtattagtttttggggtattattttttgagttttagtatttttttgtatgtttatttttttttttttatttttgttttttttttagaaggttttgagtttttttttttattcgtttgtttttttatatattttttagtatttattttttttggtgggggggatggagtttcgtttattgtttaggttggagtgtaatggcgtgatttcggtttattgtaatttttattttttaggtttaagcgatttttttgttttagttatttaagtagttgggattataggtatgcgttattatgtttggttaattttgtatatttagtagaaacggggtttttttatgtttgtcgggttgattttaaatttttgattttaggtgatttgtttgtttcggttttttaaagtgttgggattataggagtgagttatcgcgttaggtttagtttttatttttgttttatagttagagtagttgttattttttttattttaggtagtttttttgagtatttaagtattgttttattttagtagtttgttaagttatttttaatggaaagattagtttgggaggtagttttatttagaataaaagttagagtttttataaggttttatttaagttgattttttttttatttggttttagtagtataggtttttttgttattttatgaatattttagatatttatattgtttttatattagggtttttgaatttgttgttttttttatttgaaatgttttttttttattgtgatattgttataataaaaatatatatttttgggttcgggtgtggtggtttatatttgtaattttagtattttgggaggtcgaggggggtagattacgaggttaggagattaagattattttggttaatatggtgaaatttcgtttttattaaaaatataaaaaaaaattagtcgggtgtgggggtaggtatttgtagttttagttattcgggaggttgaggtaggagaatggcgtgaaattaggaggcggagtttgtagtgagtcgagatcgttattgtattttagtttgggcgatagagcgagattttatttttttataaaaaaaaaggttaggcgcggtggtttatatttgtaattttaatattttgggaggttaaggcggttagattataaggttaggagatcgagattattttggttaatatggtgaaatttcgtttttattaaaaatataaaaaattagtcgggcgtggtggtaggcgtttgtagttttagttatttaggaggttgaggtaggagaatggcgtgaatttgggaggtggagtttgtagtgagcggagatcgcgttattgtattttaatttgggtaatagagtaagattttatttcggggaaaaaataaataaatatgtatatatatgggttgggtgtggtggttaatatatgtaattttagtattttagaaggttgagattagaggattatttgagtttaggagtttaagattagtttgggtaatttggcgagattttatttttataaaaaattttaaaatgagttaggtatggtggtgcgggttttagttgtttgggaggttgagatggaaggattgtttgagtttaagaagttgaggttgtagtgagttatgatggtgttattgtattttaatttggatgatagaataagaaattgttttaaaaaataaaaaataaaaaaaaaaaaaaggttaggtacggtggtttaggtttgtaattttagtattttgggaggttaaggtgggaggattatttgagtttaggtagttaagattagtttgggtaatataaggagattttgtttttaaaaaaaattttaaaaattagttaggtgtggtggtatatgtttgtagttttagttatttaggaggttgataagggaggatcgtttgagtttgggaggttaaagttgtagtagttatgtttgtgttattgtattttagtttggataatagaacgagattttgtttttttgttttaaaatattaatgtgtgtgtgcgtgcgtgtgtgtgtgtgtgtgtgtgtgtgtgttttggtttttattttggtttttggttagattttttaaagtttttgtaattttttaaatgataaagtgaagggagtttttgttatttataataagttttttttaattataattgagtttatgttagtaagttgatttttagaaagtttttaaggttggggtttgttgttaaggtaggtaattgtgtgattagagagttagaatttttagttttaattttttgatttttaattaatggttattgaattaagtatgtttgtataatgaagtttttataaaaaaaaataaaaaagatgagggttggagagttgttaggttgatgaatatatggaggtgtagggaggtgtttagagaggataagaaagttttaaatttttttttttcgatattttgttcggagtaatttttttatttgattgtttttaagttttattttttataataaattagttaatataagtaaagtgtttatttgagttttgcgtgttattttagcgaattattgagttagaagagggagttataaaaatagttaggaggtttggatttgtttgtgattggtatttggagtgggggtagttttgtagaattgagttttttaatttggggattagataattggtaattatgggtagagtgttagaattgaattaaattgtaggatttttagttaatatttattaagaattgaagaattgattggtgtgggagaagtttttatatgattggtgtaagaagtggtgtttttggttaggcgtagtggtttacgtttgtaattttagtattttgggaggtcgaggcgggtcgattatgaggttaggagattgagattattttggttaatatggtgaaattttgtttttattaaaaatataaaaaattagttaggtatggtggcgggtgtttgtagttttagttattcgggaggttgaggtaggagaattatttgaatttgggaggtggaggttgtagtgagtagagattgtattattgtattttagtttggttaatagagtaagattttattttaaaataaaataaaataaataaataaaaaaaattgagattttttgtaaagagtttggaataatttttttttagttttggattataatgatgatgataaatatatttcgatgtaattttgagattttaagatttattagtttttgaataaaaaaaaggaaaaagaaaaaaatagtatattttttcgttttgtaaattatagtttttttattaagatggaattgttgttaattatagagaagttatttgtttaagttaaaaatttatgaggtttatatggatttatagttatataaattagaaataaatgttatatttaaaattatagagaaatgtttaggtgatgaaagttggggtgaaggagtttgtatatttattttaaattgttaaaggatttgtgggttatgtaatggttttttgtattagagaagttaaagagttttgtgtaatttttttttgtttgtgatttggaagatacgtgtttattatagagttttagttgtttcgagattttatttttttttttagttgtacgtattgttttttcgtttttgttaggaattgattaattttttttttttttttttttttttttttttgttatttttaggtttagttagtattttttgtttattttttgattttatgtttagttatggttttggatttaatattagtagtaatagtggcgttgattttattttaggattaataaatatttttttggttaggcgtagtggtttatatttataattttagtattttgggaggttaaggtgggtggattataaggttaagagatcgagattattttggttaatatggtgaaatttcgtttttattaaaattataaaaattagttgaatatggtggtgcgtatttgtagttttagttatttgggaggttgaggtaggagagtcgtttgaatttaggatgtggaggttgaagtgagttaagatcgcgttattgtattttagtttagcgatagatggagattttgttttaaaaaaaaaaaaataagtatttttttttttagtcgtatatttattttatatggttttttaattttttaagtttattttgtttgttttattttttttttttatattttttttttaatttagtatttggttggtaatgtttttttcgattttttgttaaagattttttagttagtgtttattttgtttgttttttttttttatttaaagaaatatataaagtttgattagaatggaaatagagatattagtgaaaaaaggtgatttggggaagtgtgtaggtttaggaagatagaggtttgtttttttgtttgtttaaaatttttgattaaacggttaggcgtggtggtttatatttgtaattttagtattttgggagggcgaggtgggcgaattatgagattaggagtttaagattagtttggttaatatagtaaaatttcgttttattaaaaatataaaaaattagttagttgggcgtggtggtaggtgtttgtaattttagttattttggaggttgaggtaggagaattatttgaattcgggaggtggaggttgtagtgagtggagattgtattattgtattttagtttgagtgatagagtgagattttattttaaaaaaaagaaaagaaatttttgtttaaatattatttttttagagaacgtttttttaattattttatttattttattattttattgtattttttgagatagggttttattttgttgtttagattggagtgtaatggtacggttatggtttattgtagttttgattttttgggtttaagcgatttttttattttagttttttaagtggttaggattataggcgtaagttatcgtgtttggttagattattatatttaaaattggggataagttaggtttatatttgtaattttagtattttgggaggttaaggtgggaggattataaggttaggagtttaagattagtttggttaatttggtgaaattttatttttattaaaaatataaaaattagtcgggtatagtggtgatcgtttgtaattttagttatttattaggttgaggtaggagaatcgtttgaattcgggaggtagaggttgtagtgagttgagattgtgttattgtattttagtttgggtaatagagcgagattttgttttaataaaaaaagttgggtgtagtggtttacgtttgtaattttagtattttgggagttcgaggtgggtagattatttaaggttaggagtttaagattagtttggttaatatggtgaaatttcgtttttataaaaatataaaaattagttaggtatgatggtaggtggttgtaattttagttattcggaaggttgaggtaggagaatcgtttgaatttaggaggcggaggttatagtgagttgagattaagttattgtattttagtttgggcgatagagtgagatttcgtttaaaaaaaaaataaaaaataaaaaataaaaaattggggattattggtaataatatttttatgtttttttttttttattttgtttttttttataggtatttggcgttttttttttttttttttttttttttttgagacggagttttattttgttgtttaggttggagtgtaatggcgcgattttagtttattgtaatttttgtttttcgggtttaagcgattcgtttgcgttagttttttgagtagttgggattataggtacgtattattaggttttgttaatttttgtatttttagtagagatggggttttattatgttggttaggttggtttttaatttttgattttgtgattcgtttgttttagttttttaaagtgttgtgattataggcgtgagttattgcgtttggttatttagtatttttaatatatttatttatttgtattgtttgttttttttaattagattaattatgaagataagagtttttatttgttgggttttttgggtttagaggtatgtttggtatatagtaagtatttagtaaatatttgttgagtgaacgtatgaataaagaagtgagttttttttagtaggtattgagaatattgggagtatagggttgtagttttttttgtagtaggagaatgtagttgtaataaagggaagttaagaagttagagtttagttaggtgtagtggtttatgtttgtaattttagtattttgggaggttgaggtgggtggattataaggttaagagatagagattattttggttaatatggcgaaattttatttgtattaaaaatataaaaattagttgggcgtggtggtgggcgtttgtagttttagttatttaggaggttgaggtaggagaattgtttgaatttaggaggtagtggttgtagtgagtcgagattgtattattgtattttcgtttgggcgatagagtaagatttcgatttaaaaaaaaaaaaaaaagtagtagtagtagttagaggttattttagtattttttttatttggtttgggttagggagagggtagtgagaagtgaaaatttttagttatagaaaaggaaatatgttggggggaagggagaaggaaaggtgtttttattaatgtcggggtagggtagatggagttttgggtagggagtttggattaggaaattttaatgagggaaatgtgttgtttttatttttttaagaagcgattggttaaatagagtgatagaggggataaaggttatgtttagggaggtatgtgttagaggttattatttattttgttgaatttatagtgattagtattattattatataaatatgtttgtatgtgtgtacgtacgcgtagtgtgtaaatttgatgttagttttattttttggtttttttgtttataaacgttgtttttttaagtattatttttagtttttttaaagaatttatttaaatttttaaatttttgatttttatagattttattaaagattttaaaggagataagatgagagggttacgttgtatattttaaagtaaataaattaaaatgttttgttagatatttttatatttttaagggtttttttggagttgttaggttgggagtgaggtttttttttttttttaaattttgtgtttattttgttatttttttggagttgttagtagattttagattttttttcgatttatagagtagaaaaatttagttagtttttttttgtttttttatttatagttgtttgtttagatttatgaaatttgataaaatgtaaggttttattattatttgaattttggatttgtttaaaaatattagtttttgagaataaatatttttggtgtttttttgttttttttgtatatttttagtggtttattaaaatatttgttttatgcgtatattgggtttttatttaagaggaatttgggagaatgttattttttaatttgtattttatattaggtttttttttttttttggggtgttagtgttagtagaatttgatggggaagtgaggtttgggaggtagaggaggaaggaatgaggggaaaggggaagtttgggaggaaggtttttgagaagattggtgggagagaaggagagtttgtagatagaggtttttagtttggtttgtttttttatttttattagtatttgttgagttatgagttaaattagggatttatagggtagggagggtgggataggtagcggtattagatcggaggaatgagatggatagatttgggttgtgggttaggagggtagttagttggtttagggtagttcgggttggtgttagggtaaggagaggaagggagggatgagggttgattaattttttttattttataggaggaaaagtttttagattgttgaaggtttagtaggaagagaggttggatgagattaataaggtagaaggaagaattaagggggtagagttagggggatggggcgtggatggggagggtttattttggtttttatttttttttttatagtaatttttagacgattttaaatatagtagtgatgaggatttgttttttaaattggaaggttttaaaggtgagggggaaattgtaggcggtggagatagggttgggggtaggagggttaggatttttataagaataaggtaggaatagtagagataaaaagtttatttttgtggtagtaaaaggggaatttgtttttattgtttttttgttatattgcggtttttttttcgggtttgttttttttagtattttttttagttttttatattttagcggggttttttaattttttaattttattttttttgtttgtttttttttttttttttacgttgttttttttatttagtagttggttggtaattttttttttagttttttgttgaaaattttttagttagcgtttattttttttgttttttttttttatttagagaaatatatggagtttgattttaatggaaatggcgatattggtgagaaacgggtgatttgcgggggtagggtggtgtgtaggtttaagaagatagaggttttttttatatgttttattttttatgatttgggagggggtttatttattatagtgggaggaaggagaatggggatgcggaagtgggagaggagagagagggtttttttattttttttttatttttattttttgtttttagatattatgtttttgaaacgaatgttggagaaatttggagtttttaagatttatttagagttaaagaaattaattggagaggtgtttagtggtttcggggagacgtttagttattttgatttttttaggatgatgttgggtaagagatttgttattttaaaaatgtgagtgttaatttttaattttttttgtatttatttgttttttttttttttatttttatttttgtttataggtttaatatttttatacgttgtttattatttttttttttatttttagagggatttttttaaggtttcgattttatttttatttatagttttggtttttagaaattttaatttttgttttttttttttttttttttatttttatatttttatttttttttagttttttttagtattttatgatttatttttttgagaggagtgttttttgatttttgtgtttttttttattttaattaggattttgatgtatgaggaaaaagcgagagaaaaggaaaagttaataggttttttagttaagaaagttatttttgagttgttttgatttgaagggaaaagggatgatgggattgaaggggtttttaatgatttagatatggaaatagaagataaaattgtaagttagagttaataaattaaataaattatttttttttttagattaagttagtttagtttttatttgggtgattttttttttgggtttgggaaggagagataggttttgagggaaaggtggtaaggatttggttatatgaataatttattaataacgttatagtgtgtttattatagtagatggttttacgtattaagggggattttagttgtgtaagatagttttaattttaaagaatgtaggtaggataaaaatatatgtttaaataaggtatttaggtttatgatagattttatgaagagtaaggaatattatgaattaatattttttattattataagttttgttattttgataaattatttagtttttgtgaggtttttttttaaaaatggggataaagtgatttatgttattgtgtttgatatattataagtttttaataatgtttaaaatttgaatgagtcggggtcgatggtttatgtttgtaattttagtattttgggaggatggggtgggtagattatttgaggttaggagttcgagattagtttgacgaatatgaagaaatttcgtttttattaaaaatataaaattagtttggtgtggtggcgtatgtttgtaattttagttatttgggaagttgaggtaggagaattttttgaatttaggaggtggaggttgtggtgattcgagatcgtattattgtattttagtttgggtaattaaaaagcgaatttcgttttaaaaaaaaaaaaatcgaatatataaataaataaaaaatatttgaatgggtagatgaatgaaagaattggtgttattaaataaagtaaagaatttatagttgggcgtggtggtttacgtttgtaattttagtattttaggaggtcgaagcgggtagattatttgaaattaggagttggagattagtttggttaacgtggtgaaattttatttttattaaaatataaaaaattagttgggtatggtggtaggtgtttgtaattttagttattcgggagattgaggtaggagaatcgtttgaattcgggaggtggaggttgcggtgagtcgagattacgttatggtattttagtttgggtgataagagtgagattttgttttaaaaaaaaaaaaaaaaaaaaaaaaaagattggaaggagaaatttattggagataatgattatggatattttttttaagaattttgttgtaaagggtaataaaacggtatgtgtggtagtcggtcggggagaagggagaagagaattattttggaagtttgaaaatagaagttattttaaattttattgagtttttgattaaaatttttatttgatttttgtaaatttttttgtttttattttttataatgaataagtcgttttttttatttagttatattagtttaggtataggtttttaaatttatgtttttattaatttgttttttgtatttgagatgtatatttttttttgaaatttgggtaagttttaattcgttttttatatttatttatttatatatttttgatagatatttatttcgattattttttatattattttttttttttttttttgagatggagttttatgttggttaggttggtttttaatttttgattttaggtgatttatttattttggttttttaaagtgttgggattataggcgtgagttattgttttcgttttcggttttttttttttttttttttttttttttttttttttgagacgtagttttattttgtcgttaggttggagtgtagtggcgtgattttagtttattgtaattttcgttttttaggtttaagcgatttttttgttttagttttttaagtagttgagattataggtacgcgttattagtttagttaatttttgtatttttagtagagacggggttttgttatgttggttaggatggtttttattttttgattttgtgatttgttcgttttagttttttaaagtgttaggattataggtataagttattacgttcggttttatattttttaataagagtttttttagaaatattttttaattattttaggtataattatattttatttttttattttttttttttttttttttgagatagagtttcgtttttgttgtttaggttggagtgtaatggtacgattttggtttattataattttcgttttttaggtttaagcgattttttcgatttagtttttcgagtagttgggattataggtatgcgttattacgtttgggtaattgtatttttagtagagacggggtttttttatgttggttaggttggtttcgaattcgtgattttaggtgattcgttcgtttgagttttttaaagtgttgggattataggcgtgagttatcgcgtttatttttttttttttttttttttttttttttgagacgtagttttgttttgttatttaggttggagtgtaattttcgtttttttggtttaaggaattttttgttttagtttttcgagtagttgggattataggcgttcgttattacgtagggtaaatttttgtatttttagtagaaatggggttttattatgttggttaggttggttttgaatttttgatttcgtgatttatttgtttaggttttttaaagtgttgggattataggcgtgagttatcgcgttaggttttatttttttatttttataatattttgtgtattatttttagcgtttttaaattatagttattgaatgatttgttgaatgggtataattttgatgggagtagagagttttagaatcgggtagtaagagataaaggagggtaatagtattgtattttataaaatgaaatttattgttaagaaattataaatttttaataattttaaatataaaaatttatttatgaaaattataggttataaaattaaatgttcgttttagtcgatggttgtttatattttgatgaacgagttatttttagtttatttttgtttaaatgatttgtatatattatgtaaataggtagaattgttcgaagaatgtttacgttgcgtggtgcggacgaaacgtttttcggggtttttggattggtttgtttagttattttatttgtatgacgtaatataataattggaaggtttcgtttttttggtgtattttttcgttttaattatttttttaaatttacggtaaagggatgcgagagttggaatttttattaggtttgcggaaatttagtttttcggtagttaatttcgttcgttagttttcgttttttttttttttttttttagttgaaggcgttacgggtcgtgtgtcgttgttttttatttttggcgttttaacgttttttcgtttttatttttttattaacgttcgacgtacgtttcgttttttttttttatattcgtcgtgtaaattttgcgttttaatcgtttagtcgatttgtatcgtattttcgtttttttaatacggtttaacggtcgacgttgggggttcgtttttttagttaatcggggttttagtgtttttaagttttttttttttatgtaaataattttcgtatgtttcgcgcgttcggtttttttttttttttttttaaattaaagatagttttggaagtagagggttagggtagaaagtgtttcgttttttatgtaaattaaggggcgtgtttaggcgcggagggaggtgggaggtgggagggggtgttttcgggggcggcggttgttcggatgggtcgttagtcggggtttagtcgcggagtgagcgagggagacgggaggagtcgaattcggcgttattcgtcgttattttttttcgttttatcgttatttcgtttcggggagtttttaggttcgggtttcggattttcgcgtattcggttaggtgagtttgggtgaatcgtgcgttgacgttttttttcggcgcgggagaggtggtggcggtggcggtggcggcggcggcggcggtggtgggtcggggggaggagaagttgttattagtcgtcgttattttgtttttttgttgtcgggtttgtttgttttttttttttcggtatttttatttcgggattcgtattttcggtagtttatttaggattcgtagtttgtttttaattatttatcgttttggttttagggggtgatttttgcgtttgggttcgtaattttttatttttcgttgcgtttttggttttttatttttatttgtgggtttttttttcggttgtcgtttcgtggtggtgggtcgcgttcgacggttttttcggaagggcgttttttttttatattggatttttttttattatttagcgttgtgtttttttttttggacgttttttttcgtgtcgagttatttttattttagaattttgtttttattttagtatttttgttttttatgttgtttagtcgttttatgtttgtttttttattttttttgtttttcgtttttttttttttttaatttcgtttttttttttgggtttttgtttttttatttcgttgtttatattttttttttttttgttatttttgtttttatatattttttatttgttttcgtatttattattttttgttagttttggtttattcgttatatgatttttgtattcgttttttttttatatatttatttttatagattggtttttttaaatatttacgaagtaatatttattttatttttagtttgttataaagttttttttttttaattttagtttttattttgggtttgtttggatttttttgtttttttttttattattttttatttttttatattgttttcgtttataaacgaatgtttggttattttggaatggattgagagatttgtcgttcggtttgtttagggagttggaggtatcgagtaaagaaatattggtgatggatatttttaatgaggataggaaaacgaagatggttttggttttggttttttgttttttggtttatggttatagggtgttaaggtggttttataatgtttttttttagttttttatatggtaaaatagtattttatttggaggcgattttttttaggagttaatataggagtaagtttaggaaaagatgggatattttaaatatttgaggtttttatagtttgggagtatgtatagttttagttgttttatgaggatttttttggtattaatttttatttcggttgagtaagtttataaaatttttaaatttttagtatatttttttgtaaatttttttagatggatacgaggttgttgggttgggagtttggggtatagggttttgggggtatgattagggagtttgtgtttaataaatagggaatttaaagtgttgtttttttttttttgatggaattgtatgttttttttttagtttttttttgtttgaatttgttttgttgtaagtttttgaaacgattttggtggagagagaagagattattatttgtagggaattattttttgtagataggtataaagggtagagtgtttatattaggaggatgttggatttttatttagatttttttgataaaggtgtttgggggaaaggagggaatatggtatttgagttatgagggagttaagtagattatggttgtttaagaagagtgggtagtttatatagattggaggaaaagatattagagggttttatatttgagtttttaatgataatgtaatggagtttttaagtttttgttatggtttgtataggggatagagattgagatatttgttgtttggtttataggttttggtacgttttgggggaggtgtttgtaggatttaatatatttaatgagtttttagcgtaatgttcgatcgttcggggtcgattgttaagggaaaggatggaaagaagtatttttcgtttaatttgtttgatacgtataagggtaagtttttagagatttagaaattcgttggtgagagttttgtaaagatgtttttgatggttgaaagttaggtatgtatggggtatacgttttagagttttttaaagggaagtggttgtagtagaaatattaaaagattagaggagattttttaattttatattgggttttttaaagggggtgtgggttttgggtgaatattagttatttttttataaaggcgtgtttgtggttttttgtttttggatacgtaagaattggaggaaaataaatgtggatttgggaaattttgaggttagtttgttttttgtaggtttatgattaattaattttatataaaagtattgaatgttatatattttagtttttttgatagggattttatagattttttttttttttttttttttttttgagattaagtttagtttttgttgtttaggttggagtgtaatggtgtgattttgatttattataatttttattttttgggtttaagcgattattttgttttagttttttgagtagttgggattataggtatgcgttattatattcggttaattttgtatttttagtagagatagggtttttttattttggttaagttggttttgaatttttgattttaggtgattcgtttgtttcggtttgttaaagtgttgggattgtaaagtgtgagttattataattagcgcgattttagagattattaagggtaggggaaggaattttttttaagagaagtttggaggaagtaggtaataaaatatttaatatgtataaatgtgttttaggataggaggttattagattttttatatgaggtattttcgatttttttttcgttttgttttttagttgtttttcgttatggtttgtagagtttcgggaaagttgttattgttcggcgtatgttatttttagttaattttttaagtttgaaagtcgagaataaaggtaatgattttaatgttttattagtgttaaaagacggaataggatgggtaagtaaataggagtagttcgattttaagaggtagatagaggtttgggggatttagagtgatgggtattttaatttgaattttagggagtattggggtttggtttagtttagttacgtttgagttagagacgaagaggttttttttttatttattgtaggttttttgttaaatgattaaggaatggtattaaattttagttttttgttttggagagagagtatgaaaaaatagataatagtttataaaggatgataaaattaatttgtttttatatttgtaaatggtagtaatgggtatgattttagttttgagtttttattagttggagaagttagggaggtattttaggtgtgaataatttttttattttgtttttttagtttcgatgttttaatcgtttagtcgtcggaatcgtagttattgtcggttttatagacgtttgtttttaattagtcgaaacgatttttagtagttttcgaggtatttggagaattggaggggtggggaggaagaatggtttatagttgttttatttatattatttattatttttttgaatatttttttagaatatttttttggttttaagcggggtaaagttttgggtataagttagcgttatttatggagtatatggagatggtgagtgtagtatttaattggggagttgtgtttgggtattatgggatgtatgaattttgtattgtatttttagttaagtgattttggttttttttggttaaattaaggattatttatatttagttttatggaggtatatgagtaagtttaagttttagttttatatgatggagtgtagtggtgttagaattgatttttttggggaataagtagttattttgtaggggggtgagtttgaaggcgggaaatttgatggtttggtatttgttagagttttttattttttttttttttgagacggagttttattttgttatttaggttggagtgtagtggcgtaatttcggtttattgtaatttttgttttttgggtttaagcgatttttttgttttagtttttagagtagcgggattataggtatacgttaatatatttagttaattttttgtgtgtttttagtagagatggggttttatatgttggttaggatggtttcgattttttgatttcgtgattcgttcgttttagttttttagagtgttgggattataggcgtgagttatcgcgtttagttagagttttttatttttatagtatgtttttaggaaatgttttttgttttttgttttgtatttttattttaataggtggaagggtattaagtttattgttacgattttttcgagaggaattttcgattttgtaggcggttggcgattaggataaggttgttaaggaaagggagtttgtcgaatagtcgtttgggttcggattaagttttcgtttttaaagtgagtggttgttttttggttaagatattatttattgtattttagagttaggtgttggtttatttatttttttttttattatttttagttgtgtttatttgttttttaattattgatatttttttttattttttttaaaatatagattttataatttggagggacggaggtgggcgtggttttgatgagttggagggttcggattttaaattttattatggttatgattttcggggtgggttatagtttttaggtttattttagttttttttttatcgcggaatgatgtcgtttttcgtgagttttggtgttttgttttggaacgattatattggaagttggagagttaggaattaggatttagtttttgatttatgagatagaagggagggtgggaggatgattgatagtaggtttaaggagttagaagggtatatgattgtttttttgagtagttattgttggatttttttatagatgtattttttatatttttcgtttttttcgttttatggattttaggggttttatcgatattttatttttgatgggtttaggtgagtaatttaggtttgggtttgtggttgggggtaggggaagtttattgggggaggagatggttttttagttaggaggtttagtttaggattagtttcgtatgtggttatataatatgttatattttatttttttttttgtgtatagtcgtttttttcgtgtggcgggttttcgaggtttagggttattaatgcgtttagtagagtttgtgggtcgtttttttatttttaaagaggataattttaaagagtttgattagttggattaggagaatgatgatggttgggtaggtaagtggatattaagggttaagaatttggattttgaaaggtaaaatttaatgaggaaaaaaaaatatagggttatgtgggtgaaaggtagatattgaagtgtaggaagattaggtttaatggtttatatttgtaattttagtgttttgggagtgttaggtgagaggatcgtttgaagttaggagtttaagattagtttgggtaatatagtaagattttttatttttataaaaaaaaaaaaattttttagttgggtgtggattgtgtatttgtggttttagttattttggaggttgtggtgggaggattagttgagtttaggagttggaggttatagtgagttatgatcgtgttattgaattttattttgggtaatagagcgagatttttaaaaggaaaaaaaaaaaagagtaggggaggatggatggggaatattaagtttttgtaaagtggtgagaggagtaagaatgataagattttattggtggatttagatttcggagggaaggatattggtattggtagtttattttgttatatagttttagattattttttaagattggagggtagaatgtttgggttattaatatttatatttttttttaggggtttatgaagaggttgattatattgaaaagtttaagtttagcgatgaggaagatgggcgagattttgatgaggagggagttgagggttagtgagttagggttattaggggagaagaggagggggttttggtttgtattttggtaatatatttttagaggagtatattagttgtagttgattttaattttattgttgatttgtttatagtagggatttttaattagtttttggtgaggaacggttttttgaagtagatggtaaaaagggtaatttttttaatagcgaatcgtttatttttaagacggtttgggtagaaatttttcggtttttagagatagagtcgggattttttgttttaaagttttttttatttttattttatcggggtttcgtcgggaattggggtttttttggggattatttagtgagtgtttttaataagggattgagagggttagttgtgggaaattggtgttagttgagtaattgaagcggttgtgatatagaggaaggggggtgttaaaaatgggttgtgtgaagtgttaggttgtagaatattttgggaagtttttaaatatttttggtaataggggagtttgggtaagaagtgagaaattgggatgttaatgaggaaagaagaaaaaggagttttgggtgtttgggtttcggaaggagagagggaatagaaaaataaaaagattagggtggttagatagttggatttgttagtatgtattagtagtttaagttatttagtaggttgaagtagaaggattatttgagtttaagtttaagattagtttgggtaatatagtaagacgtggttttaaagaagattaggataatgagtttgttattatttagagagattaattttaaagtttgggtcgttgtattttgtaagtagcgatagttgatttgttgtaaaagagatgatagaaagtatagtaattgatttttttggttttgttgggttttgttaattgataggatcgtgggggttttttttgtaagtttttagtatttgaagatgaggatgaggtatggcggtagcgacgaaagtagtcgttatttgagatttttttggtagtggagcgggttcggcgacggcgagaagaagaggagcggcgtatgtaagaagagcgtcgggtagtttgtgttgagaagtttaagcgattcgatgaaaagtttggggtatttgataagcggtttaaagtagagtttgttgttttatttgttgttttttttattttagttttattatttgtagtttttaaagaattttttgtatttttagttttatttttagtattagttttaatattagagaaagaatttgaagagttagtataggttttttttgtttaatttatttttattttaggtgtggttgcggtttttattttggtgagtggtggtggtagtattagtagtattagtagtggtagtttcgaagttagtttaggtatggagatggggataggtattattagatgttagattattgttttaaggtgtttaaaggtgtagggtggtaaggttggggataaatgaagtagaaggtagttgttttggtttattggattattagtgatagtgttttattatttgtatatttgaaggagggaaggttttgtttggaattttaggttgtagtttaatattattttttggtagagtattgtagtttacgtttataattttaatatttagggaggtttggggtggaggatcgtttgagtttagggagtttgagattagtttgggtaataaagtaagattttgtcggttaggtatggtggtttatatttgtaattttagtattttgggaggtcgaggcgggtagaatatgaggttaggagtttaagattagtttggttaatatagtgaaattcgtttttattaaaaatataaaaattagttaagtgtggtggtatgtgtttgtagttttagttgtttgggaggttgaggtagtagaatcgttttaattcgggaggtagagatttttgtgagttaagattatgttattgtattttagtttgggtgatagagtaagattttgttttaaaaaaaaattttgttttataagaaatatataaataaaaatgaaaattattttttatgggttaagattgaagaaagtattgttgttttaatggttttatagaaagttaatgttattattataggtttatgagaggttatgaagtgttttaatgggttttaaatgggaggggttttaatagaatagatgttgaatagaatattttagttttaagggagttagagatgagacgtgagatttttggggtgtttatggagtgtttattgttggattagattattttgttgtgtttttttcgatgtagtggaattataattgtttttaaaagagggttttgaattattagaagaggtttttttttttattatatttttagttttaaaggtggaatttaagggtgatgggattggttttattcgttagttttttagttagggtttgggttattttaaatattagaagtcgttgttttttcgtttttagcggtagtagtaggtgaaattaagttgtttattttttaagggttgtttttttttttggtttcggtttttaattttttttataagttattttttgggtttttttgtttttttgtttagttgtttttattgttacgttaattttttttagtttaagttttttttttgttgatttttttgtttatgtgtgttttgagttttttttattttgttttttttttttttttaggagtagtttttgaagtagtagtagtagtattagtggtagtagtattaatagggttttgttttttttattttagtgtttttattattattatagtttgtgattttgggggttgtgttagttttataggttttattttcgttttttaaggttttgtatttaggtgttttgggtcggtttttatttatgtttttaatgaattttgattttcgatggatgatgatttttttttatgtggattttcggtttttttagggtcgtttttttttagatttttatttttttggtgtgtatttttttggtaagggggtatgggaggagtgagaaataggaaagtttttttagttttaggtattggatattagggttttattgtgattttggtatgataggttttgtttattatagtgatgagggaagggtatatgtttagtattgttgagatagttttgttgtaaaaatgggtttagttaagaaataagtagtggttggttaggtattgtggtttacgtttgtaattttagtatttagggaggtcgaggtgggtagattaattgagtttaggagttcgagattattatggttaacgtggtgaaattttatttttattaaaaatataaaaaagtagtcggcgtggtggcgttcgtttgtagttttagttattcgggagattgaggtaggagaaacgtttgaatttaggaggtggaggttgtagtgagtcgagattgtgttatcgtattttagtttaggtaacgagcgaaatttcgttttaaaaatgaatgaatgaatagtataattttattttaaaaatgaatgaatgaatgaaagaagtagtggttttttatttgttaggatttatttggggtgggttgatttttttgtagggaatttgagtggataattttgttatataagagtaggtaaggttcggatttattgggaataagagatggaagagttgatttgatcgtaaggggagatgttttttgggttggagggtttgtgatatgaataggattatttttttttttttttggtttttttaggtttagtttttcgagagcgtttagatagtgggggtttaagtttagagttatttgatcgttatgtatttgttatgttacgggaacggggtattttatcggtggatttaaagttggtttgggtaggagatgtttttatcgttatattcgttgaatttcgtttatttattttatttttgcgttaggttgcggatgaggatgataaggggatgaggtgagttttggttatgagaaatgggtgagtttatagtgaaaggatttaggtttgggagaaaggtattttgggttagtggtagggatagggatgaacgggaaaggagaggttggatggagtggtttatgtttgtaattttagtattttgggaggttgaggtaagaagattgtttgagtttagtagttcgagattagtttcggtaattggatgttatttttgttaaaataaatagaaaaatagtaaaagagagtttgtattataataaagtgttttttttttatttagttttggtttttttgagatatttatttttattttttttgtttgtttttttaggagcgagatttttttagtattttttttattattttatttggttagttatttaggtttttttgagaatggagtttttgggtttttaatttttcgtttttttttggaggaattagggtttcgtttatttttttggtttttaggtagtgatgaagtggttaagatataaattttattatttaagaaggagttttttaaggaggagattgtatagttgacggggttagaagtaggtcgaaagtttgttcgcggagtcgggagtggaggttagggttttttattattacgtagagagagtcgtatagagattcgttggggttttcgtttagggagtagtcgtcgtggaatttttttagaggagttaggggttttatttcgtcgggttgggtttataaagaaatttttattatttataaaagtagaagagttgttttttaagtttttcgaatagggggatgaaatttttaaatttttaaagttagatttatttaagataattaaggggaagttagggggttttaaggagattttatttaatggaaattttttttttgttttaaggtttcggagggattattcgtatgaaagagtgggttttattttttgtcggggtcggggtcgaggcgagtattttgttagagggaggggttttcgggggatttatgggggacgagggcggggagttcgaagtcgggaatttcgtagttatcgagagtttcgaggagatgatgggcgtggaggtgggatagggggattaaattatttttttgtttttcgaggtcgtattgttagcgagatacggagcgagggtttagagtatgaggaaatttttaagcggcgtcggtagcggggtttagaaataggtagcgagatttatgagagtgatttggtttttttagataaggaggtttttatatttaaggagggaatatttatttaggtttttttcgtttttttattattaggagttttatttttattagttttagttcgttttattgttcggggtgggcgagtttttatttttagaggggtgttatttcgtcggggtcgaggaggagggaggttttttttttaagtttgtttaggttggagttttttagttaagtttttggtttttaagaaattttttataggttttttgttattaagtaaggagtttttgaaagagaagttgattttagggtttttgttttttgtggcgcgcggaggtagtaatggaggtagtaatgtgggtatggaagatggggagcgatttcgaaggaggcgatatgggagggtttagtagtaggataaatcgtttcgttttcggaggttgaagtaggaacgggagaatgtcgtaagggggtttgagggtaagttttttttaatttttttagttttcgtttttgtatttgaggaggtttttataatagttatagtggttttagtatttcgtcgggtagttgttaagttttttgatttgttaaattagaatttagattaagttaatgaggaatgggagattgtattagagagtagtgattttattagtgagcgtcgaggggataaagaggtatttttattagtattgttgatatttaaggttgtgggaatttttgggggaggtggaggtggagtcgtattaggtattttagttatgtttcgcggagatttgagttagagagttaaggatttgagtaaacggagttttttaagttagcggttaggtatggaacggtagaatcggcgttttggtttagggggtaaggttggtagtagtggtagtagtagtggaggaggcggtgggggttttggaggaaggatcgggttaggacgaggcgataagaggagttggtttttttttaagaatcgaaggtgggtaggaataaataaatttattgtggtttaaaaattggaggagggggaaaaagtttgagggaaagataagtttgggtggagtggagattgtggtttgaggggttatgggttttagaatgttagtaggatttttatgtttggttaaggtaattggaaagcggttggtagggtgttagagttaagaatatttatttatgtatttattgttggttttttgttttttagtttgtgtatttgtacgtataggaatttttagaaggatttaaaaatatttggattttaatagggaagagaataggttgtaagtagaagttgggaaatataatttgtgggaaaaagtaacgatttagtggatattggagttaatgttttgttttttttagtcgttttttagaggagcgtttttcggggttttttttgttttttttattttttagtagttttgttgtttttcgtttggattaagttatttatagtaattttgttggtatttaataggttttggtttagtttagtagtcgttaagggagtgtaattgtattagggggttatttaaggtataagtttgggtttttttaagttttttagggttttttttttaggtttttaattcgatacgagttttagagggttaatagcggttttagttttggtaagttggaggggttatgggtgggaatatttttatttttagagaaggttaagtgttggagggagcgggtggagaatttggtttaggggttttgttgttgggtgcgtttttgtagggagtaagggtagaagaattgggaggtggagtagagaggaaaagttagggttagtggtagagttaggtagatgttgatttttttttttttttttagatttttattttgaggagtcggggttaatggtgagaggggtgggtgggatttttcgggattttgtcggggttagtttttttttttttaaacgtcgggagcggttttttagaaaattagagttgttataggaggtaagggatgggtttgagattgtgttttattgtatttttattcgtgaaaatttttttgggttatgttttttttgtttttttttttgttttttttattgtgtttttattttagaatttttagtattagttttttatgtgttttttttgttgtttttatattttgtgttattttattttgttttggttttttataatttttaatttttatttaatttatgttttgtttttggttttttttatttgtaggaatttttgttatttttttatagttttggatttttgggttttaagtttgagggtttaggtttttaggtagagtttagagatataggtatagaggttttgattttttatatttggaatcgtttatatattggtgagtaaagttgagtgaaaggattatggtagaagggttaagaatgagaggggtttttgaattgttatttttttattttttttttggttggtgtttttttttttagttattagtcgaaagagttatcggtttagttttatggagttttggatggagtttttgagtttttttgaggatgtggttggtatagaagtgagtgagggtgggagggtgtgtttgagttgggatttttttgagtattggttatattttttatttgttttgggttgagtttggagttgtttttttatttggttgttttttttttgtagtttgtatgtgtgtattagttaggtattggggtgttttttattttgatttaattagttttttttttattttttttagatgagttagtttgatagtggggtggatttgagtggggatttttaggtgttattaggtttttgtagttagcgaagtttttttgatggaggatttaagggggtagtagagggattttttaagaggtttggaggttttttatttttgaatgttgttttttgtgagggtttatttggttttgaattttttaggagattattatttgttttttacgatggggatagaaaggtaaaagattaaaaaaggataaggggaatgtttttaggaatttgattttggttttatttttttttgttttttttttttgcgtgtgtgttttgggtattttaatttggattttttttttttttttttaatgtattttattgtgtgtttaatttaggagttgtttcgggagtagtttttgttttttggttttattggtatagaacgattatagtatatagatcgaggtatagagtttggttttattcggttattttatcgatttggttttttagtttagtttggtattagtgataaggtttgtgtgggttggatttgggtattttgagttgggtggagagaagggaaggattaaaggtgggatatagaggatatatgtttgttacgggataatgttttttgtttttttgtgattataggatttagatttacgtttagtggtaggagatagtttgaaagtagagaaggagttaatagtattagttattgaggtaagtgggagtaagagtttggtggaaaggtttaagatttttggggaagattgttgggagtgattagggcgtttaggatgttagatatttttttttacgaggttttttttttttaggttatttttgtattacgagattgggagttgttttttagtgttgttgtttttgttgagttataatttaagaatttggattttgggtattgtgtttcggagtttagttttttaggttagcgtttgtattttgaggttttttatggtagtgttgggttttttagtttttaggtaggtttcgttttttattgtatgatttttttagtgaataataatttttttttgtttggtatgtatttataattaagtttttttacgttgtagagttgtgagatattattttgttatattatttttttttttattttttgtttttatgggtgggatggtgatttttttttttgattatagatattaaagttgttttaatcgtgttttttttttgtagatttttgggggagttatggatttttaattatatttaaatagtggaggttttcgttttgggatatttttattgtatttttataggtaagattcgatgtttgtggattatagaagtatttggagatgtgtttcggggagagggaaggggaagatatagttttagggtattagaagttagtggatttaaggtattgttaggattttggttttttaatagtttttttttttataatttatttttagattatagtttttatatttatttttcggtttagttttttttttagtattgttttttggggtagtttttaagggttagtttttggatttttttataatgtaagttatagagttggggaagttgtcggttggaggagttttttattttttatttttttttttttatttttcggttttttgttttagttttttgtttgatatatcgttgttttaggtaagaggggggtaggtattagatattgggggatagggtagggagaatgattttgtgggggttgatatatttttttttgtttttcgataggtacgttaggatttgttatttttttcggatttttattttatttttttgtagtttggtggttaaagtggttttttttttttaggggtttttgtttagtaggtatattgtatttttatattttttttttatttgatttttttgtttagttgttggttttgattttttttggttttttgatatttttttttgtttttaatatgtatatttaaattttttgttatagatgtttttatttatggtagatttatagttgtttgtggtgaattttggttttttgtcgttagtattattttttgttttattttttttttttttgttatttgtgggttttgttttgtagttttttagtttggttgtgcggtttttatttgtttttgttattcgggtgttgtttttatttgttaggttttttttcgttagtttggggcgagtagaggtaaggtataggaattgaggggttagggagcgttaagatttgggagtagggattttgtattttaaggtaggtagtttatgatttttttttttttagttgtatttagtggaattaaagtcgttttaggattattaaaaattgagtagtaattttgggggatttggattattacggatttttttaattggaaggtgaaacggaatagggatgtggattttttaagtgtttttttattttggaattagggtttggattttaggtttgttttagacgtttttttttttttaggtttttttttggttttaattttcgttttaaggttacgttttttatttatagtggagtttttcgtatttagcgcgtcgatttttattagtaggtgaaggagaaatttttgtggttttaattttaaattcgagttgttatttgattttttgtttttttattttatcgttgattttttattgtgatttattgtttaatatatgtttgttttttaggtttttttattagatgttttgcgttggatatttaagttttgggagcggatagggttgttatttcgagaagggttttttcgacgggtagaggagtttgggtttcgaggggataaggagtttgggttgtttttatttcgttgagggagttttttttgttttttattttcggggtttgtatatagattataaatatataagggggaaaggggtgggcggggaggggttgtggggttggggttttatttttttttttttttttttttttggttttttgtttttggggttgtttgttaaaaaagagtaataaaaggatttaaaaaaaaaaatttttataatgatttgggggatgagttgtttgtattgttttaaagtatggtgttgagtgatttgtagttttagttagggaaatatttattatttattttagtgagttgttgaaattaaaaatatgattatcgtattggatttttaaatttttgtgagtttggaatttgggttgagtttagttggataaatttgtttttttgtgttagtgagcgaggttaattggttattagtttgtagttgatatttgggttggttttaatatggttttttttgtatatttagggttttggtgggatatttgtaatattattgggttattaattagtgtttttatatggattttttagtaggtttgttaaatgttcgtgagtttatgttttaagaggtttagttggaattttttaagtttatgttatgtttagttgatagagtattaaattagttaaggtaggggatgggggggtttagaagggattttaattgtattttaaagggattagtaaagaatttgtagttatgggattttagttttttatgatgaattaaggggaaatttttgttaaggttttaatgttggagtatatttaaggggttttttgaattggatagattaattttagtattgttaaattaagtgggattttatatggtaacgttgtatgttagttatgttaaagattatatttaggtttgtagttgtttagaaattttttttgatgggtaatttgagagttttatgttagtgtgtatttggaatatgtttttaatttaaaatataggttttttatttatatataaagtgttttcgtataaaaaatataaatattaggttgggcgcggtggtttacgtttgtaattttagtattttgggaggttaaggcgggtggattataaggttaggagttcgagattagtttggttaatatggtgaaattttgtttttattaaaaatataaaaattagtcgggcgtcgtggcggacgtttgtagttttagttatttaggaggttgaggtatgagtgagaattatttgaattcgggaggtggaggttgtagtgagtcgagttcgagatcgggttattgtattttagtttgggagatagtaatattttgttttaaaaaaaaaaaaaaataaatattaaaattggtttgtataatttagcgtgttgagtagaatataatagtgttttaaggaagtattaatttaaaaaagtttatataagattaagggatatattatttaatggagataatgtagagagaaagtagttagaaaaattcgatttttattttttaaatattgtgaaggaagaggggggaaacggttttttgatgaggaagggttatagagtaaagagttaaggattattagtaaaggttcgttgggtattggggaagcgttggggattgtagttggggtttttttgtagtcgtttttgtatattagatcggagttaaagagaaaaagtaagtaggttggagaaacgttggttaagtttttatgattttagtaagtatataaggttattttttagaagttaatatttttttttttaagtatattgttaaatagttcggggtggtattgttaagtttttttagatgttaaaggggaaaataaatggtagtattaggttgattagtttatcgttgaagggatttagggaagagggattttagtttaattttttttattagattatttttattttgttttaaggtggtatttgttgtttgtagtttttttgaatttttggtgtttttaggtttcggtttaggttttcggggttcgttaggggtcgagtttcggttgttttagttgttcggtttatagtttttgagagaagtagttgggggtttttattttgtatcgtttgggggatagggggttgggagggaaaagaggattaacgttagatttagtgttattattcggtttattttttttatgagttaattattttattgagtttttatgttagtggagagaggggaaattaagagtttaggatgtggtttttatagtagaaatgtttttttaattttttttggtattagttaaaattaaagtgaatgtgtttgaacgtgttttttaaaacgaaaggtagaaggggttaagttattcgggatttagagttaggtaatttataagaggaaatttattttaaaggaaaatgggatttaagtatatggggattaggtagttgagtaattaatataggattgttagtaaatagattaaggttaagttttgtatggttatgtaataattaagagtaagtttgaattttagaaaaagtttttttattaaacgaggggaggggagattgaataataagagtttttattatttttatatagtttgattttaggtatgacggggaaatttggatagagagagaggtttagggaagaggaaaattaattttgcgttttttggtaggtatattattgaggtaggtattatttagagggggttgcggttttatttttcgttggttttgaatgttttgttggataatagggatttatttttggggaggaaaagagaaaatagtaatgtttttgatttttagttgttatgatttattggattattttttgatatttattggggggattgtagttgtttaaggttttgttttagttgaagttttattttgtttatttcgggagttttttttaggagtaggaggtggatttcgggatatggttttttttgttgttgttttaggggttggggaagtattttttcgttgggtgttagatggcgggaagagttaggttttagaatttttagtttttaaattttttttttttagttttttattttatattatttggttttttaatttttttttttttagagtatttgaggtttaggggaagttttttttgttttttgaatttttattggttttttaggaagtggttgtgaaattaaagaatattatatttttttttagatttttttagtttttttaagtattttgattttatcgtttaataggttttttatttgggggggattattaattttgcgaacgtatttgagaatggtattagggtttataggtatgtgttttagtattatttgaagttttagttttattatagtggttagttagtttattaaggagggatttattttacgagatatacgacgttgagggatagaaagtagatttagaatataaaatttttaattatttttagaaatagattagatttaggttatagaatgttagtttagaaaagaaaaatgaaaattgtagagaatggaaattttaggaaataaaaggttaaggatttggggttaggtggtgtttataattcggttattgataatagtagtaagttttatttgttgtttttttaagtagtgtaggtttagggttaggtatttaaataggttttggttatataattttagtaatcgggttttaaatttattatttgtgggtaaaatataaggagggaatgttggtacgtggtagttttgtatatgtaataggttttatttgttttcgtttggttagtttttgatttgtgtaatgtagtatatgcgtagtaatgttattaaattgtttttggagaaattttaggtttgttcggatgatgtttatatttggttgaatttgtattaaggattgagagataagataatataaagattttaaaattaagaattataagattgggagtggaggaggtagttgttttgattagatttaggagaggaaaggaatagagaagggttatttataaaattttttcgtatatatttttttagtttcgtgattaatgtgtgggttgttatttgtggaggaaatagaataggtttagtttaaagttttagtttttttaagatttttatttcgattttaataagtttagggtttgtgtgggggtaattggagttttatttggtagagaagtagttagaaataaggaataaaatgtgtaaaagaggagagttttggggtttttggtttttatttattcggatgttattgggtgtgggtttttgattatttaggtagtgttggtggaagaaggatcgtagttggggttggagtcgttgtagtggttggaaatgtttatggagaagtattattacgtttattatagagaagttttggtatagaagagaaagtaaggttttaaagaattttgggggataagggtagatgttagtaatggtttttattatttggtttgtttatttataattagattattaattttattttattttggtaatatttttaaattaaggttatttatatttttttggttgtttttttttggagtaagttaaagtattttttttgtttattaagggttttattagttttaggtttaaagatgttgttggatttattgaggcgttgtatgaaggtagtaatatttttattgttgttagttcgagtttttagggagtttagtagggagttgagtatattttgtattattgaggtaaaaaatttcggtgataggtttttaagatttaggtttttaggattttttgcgttattagaaggggagtttggtgggggtatggtttgttgttttggggtaggtggtgggggtggaggaggtgggggtggtggaggggttgtttgtgttgtttggtaaataaagaaagaataaagaatagaaagtgaggtgagaatgaagatatacggaaataatacggtattaagagggtataaattaacgggtttgggaagatggggagttatattttgatttttattgtttaaagtagaagtatggtaggtatttaatagagttaggtagtataatttatttatttttttttttgaataggttgttagaaagtagtgatattaattattatattttttttttttaaattttattttttttatttttaaaatgaaaggtttagagttaatgaatttttagggtttttttttttaatatgttattaggggtttttatttagtggttatataatggtaagaaggtattattgtttggttgggtcgggggataggaagatgaggtgaatggtaagttagttatttatttgtaagaagttagttatgttttggagaaaggtagggatattaggtatcgttatagtgatggtgggagaagttatattagattttttagtttttggttttgtaggttttagtaggttttttagaagttgagagaattgaagattagttatggagggttgaggggtgggtggaggttgggtaggttttttaggagcggggttagttgtggtagttgtgttggtggtgttagtattggtagaagtagtggtaggggttggcggtggagttatatttggggttttttgagttgtaagaaattaaaaaaagaaagttgggttgagtatggtggtttttggttgtaattttagtaattttgggaggttaaggtatgagaattgtttgagtttaggagtttaggttatatagtaagattttatttttattagaaaaaaaaaaagataattattagttaggagttagtattgttagttatttaggaggttgaggtgggagaattgtttgagtttaggagtttaaggttatagtgagttttaatttattggattgtattattgtattttagtttgggtgatagagtaagattttgtaatttaaaaaaaaaagaaaaaagttggtcgggtacgatggtttaagtttgtaattttagtattttgggaggttaaggtgggtggattataaggttaagagttcgagattattttggttaatatggtgaaatttttttttttattaaaaatataaaaaattagttgggcgtggtggcgtgtatttgtagttttagttatttaggaggttgaggtaggagaattatttgaattcgggaggtagaggttgtagtgagttaagattgtatattgtattttagtttagtaatagagtgagattttattttaaaaaaaaaaaaaaaaaaaaaaaaaaaagttgaaatttgaagatataagatattatagtagttttattttaggaaagtaggaattaagaaaatatggaaagaattggaaagtgttagtgagtagattaggaaaggagtttaaattttgagtggggaagaatgaaaatttatttataaggattggttgtataagaagttgttttataaggtcgtttattatttgggttaacgaggtattggtatttagatcggcgttttgttggatagagagtaagggagaattttagatttgtttttttatgtattattataggagtttttttttagattgttacgtattagaatttttcgatttttgtttattagtgttttagagattgggggttttttaggatgggaaggtcgagtttgtggaggagtgggtcgggtaattattattcgggttggagttgttgggaagtttggtatttgttgttttgtgggtggtagaagagatagatcgaagagggttgagggttaggtttttgttagttagttgttattatggattgtgttttattttttaagtttttttttttaggttattatttgcggtcgcggaggtaatagttgttattatggtttgatgagtgatttggtgggcgacggcgtgtatgaatttagggggtagggagggtagttggatgagggtggagtttggggggcgggtttgatgtaattttgaatttggatttttttaatttatttatttagtttttttttttttttatttagagtttagtttgttttgatgtttttatttttatttagggtttggttatgattagggggttttagggggttagtgggagtattcggaatattattaggttgtgtgttagaatttgggtagggagatagagatagtggttttgaggtaggtagggttaaggtttaattatatttttttgagattaggtatattttaggtttataattttttaattagaaagtttgtttttttttttatttaaatagggagaggtattttttttattatataaatatatttttaaagataaattaatttttatattttttatatttgtttatttaagtttttgttttggtttttaggttattattattagtatgtgttttttttttttttattttgtttttttatattttagtatgaattttttttattatgttgattttgtttttttcgttagtaattatttttattttgaatgtttatgtgtattatgattacgggttttatattttggtgggaaattcggatgattttcgggtggttggtggttggcgggggagttggatttggcgggggagtttttttagttgaggattcgatattggtagaagacggagttacggatgaggtttgtttaggattagggggaggtgtttttgtattgggagttggggggggtcgagttttattttttgttatggttatagtggtttttatattgatttgaaaaagatagatggataggtagatgtgagaaaaatataagagtttaattaagaaaattttatgataaatttttaaagtatttttagtttttattattatgtttttagttttttttttttttaattttttttaggtttagtagttattttgggttattttattaatattttttatttttttttaggttagattttttttaatttatttgtatgggaatggttgtttgttggagtattatgggggtggtgtagtgagatataggtcggattatatgtaggtgtcgtgggggcgtgtaggttagattgtagcgtaggttagatagtgtaataaaggtgttgtttagtagtcgtaggtttttttttattaagttgattaatcgttgatttttttttcggttttcgtgttgcgtataattagttaaatataaaaaggtagaaaatattaagttggagtttattttattaataaaagtaataatgtttattgagaatattatgttttttaaaatttttagttatatttttggaagtttatatgtagattaaatttttgtaaataaattatattttatttatataaggaatattttattaaaatattattatgaattagtaagttattatatattgattttttgtattttatattttttaaatttatttaggggtataaggggtacgatacgaggatagtgtttatagtaaagattattattttttttgtaagggaggataaaattatttataggtttagagagaaattgttttgttgtaatgtgtgtttttttgttttgttttgttttttgagatagtttcgttttgttatttaggttagagtgtagtagtgtaatttcggtttattgtaatttttttttttcgagttttagcgatttttttgttttagttttttgagtagttgggattataggtgtgtattattatatttagttaatgtttatatttttagtagagatggggttgtattatgttggttaggttggttttaaatttttaattttagatgattcgtttattttggttttttaaagtgttgggattataggcgtgagttattgtatttggttttgttgtaatgtttttttagggagggaaagagttatttgtattttagtttgttttgttttgggagtattggggttgaggagaaagggtagggttattaaagggtttatattgttattgtagttcgtggtggtagtagtatttagaatttcgtagtagcgttgtaagaagggttggaggcgattttttagtcgttgtagtttttggagtatttcgatatatttcgtaggggaaggatggttgtggataaatttaaggggtaatgagttaaagttttttttagatttttatttttatagttaatagggattatatgtgttttttttttttttggttttttagagttttggtttaatttttttttggattagtagagtttttattttttttaattttcgttttttaggtttaaacgatttttttgtttttgttttttaagtagttgggattaagttgtttgttattatattcggttaatttttgttttttttttttttttttttttttgagatagagtttcgttttattatttaggttggagtgtagtggtgcgattttagtttattgtaagtttcgttttttgggtttatattatttttttgatttagtttttcgagtagttgggattataggtgttcgttattatgtttagttaattttttgtatttttagtagagacggggttttattatgttagttaggatagtttcgattttttgattttatgatttattcgtttcggttttttaaagtgttgggattataggcgtgagttattgtgttcggtttgtattttttagtagagatagggttttattatgttggttaggttggtttcgaatttttgattttaggtgatttgttcgtttttgttttttaaagtgttgagattataggtatgagttattgtatttagttaaagtttttattttttatttttatttatgagaggatagggagaagaaaatgaattgtttttattttttttattataattttgtatttataatggtgaaagattaattttaagaaagagagtaggttttcgtgaatttagaggagaatttcgattaggtttaggagatattatttggatttttttgttatagggagagtagtagttttttttagttgtttgttttagcgttatttatttatatcgagagagttttttttcgttttttaatgttaattttttaattaagatttttaagtaatttttttttttttttgttatggtttatttttttttttttatattttatttaggattttttatttattaaagattttttttattttttatttgggtgtatttgttttcggggtaggtgttgggttcgttggggttgggttaggagtgagtttcgggttttgggttggggtacgtttttttattttttttgtttttatgggttttcggggaggtgttttatttttaattggttttgatgtttgagagtttaaggttattggtttcggggttatagtcggtggttgcgggggcggttgattgtgttgcggttggggtttttttcgatattgaaggtaggggagagttaggatattaaaggtagggtaagattgttgtagaggattattttataggagattgaatagagaaagtattttaattagattttttgaaggtatggttttgtaattttattttcgattcgttagtaattagtataagattgatataaattagatgtataataagtatttgtaatttttttttttttttttgagatagagtttcgttttgttgtttaggttggagtgtagtggtatgattttagtttattgtaattttcgttttttaggtttaagaaatttttttgttttagttttttaagtagttaggtttataggcgcgtgttattatatttaattaatttttgtatttgtagtagagatagggttttattatgttggttaggttggattggaatttttgattatacgttatttttttgttatggcgatttaaagtgttgggattataggtaggagttattatattcggttatagtatttgtaatatttgtaaataaatttttaataaagagtagagattgtggtttttttttttttataagttggttttttagtttttataagttaagagagtagaattttttaattgaaaagagatgttatgagattaagtttgaaataaattttttagatattaggtattaagaggattggtagaaatgagagagttttataaagatattttttttgtttaaaagaatgaatattgtagagaagattagattatgaaggttaaattttgtgaatgtggttagtgaagttttaatttttaggttgagagaaaagggagagggagggtggagagagattttagttagttttgtttatttatttttattcgggatagtaaggtttgtatatttttgattatgtgttgagttattattagtcgtattcggggtttattttataatgagagaaggtttattagggtaggttatagatgaagttatgagttttattatttattaaattaggttttagttattttttagttaggtttattttattttttagttttttttttttagatttttttttttgattttcggaggttttttaatatttgaatcggggtttgttttatgttgatgtgaatatttatagtagagtcgttattttggggaaagggtaagggaagttgttttgggagaagttaatattaaggtttttatatttttaatttattttttggagttttatttttttttttttttaaagattgagattaatagtatattatagggttttttgaatttaatttaaagatggaagtatttattttattaattttttggtgttattataattaaagttatttataaaagtttttttttgtggaatataagtttataggaagattgaaggttttaattatgatatagttgttggtatttcggttatgaatagaggttttaggttttcgagtattagggggggattttttattatgagtggttgaggtagatttcgttttagaagatgttttagaagggaggtgagtttgaggaggagttcgttttattaggtggataattttttttttaatatttgtagaaaaatagatatatattaaaatatagtatgaataggtaaatttatggttttagtttatttttttagatagtagttttaatttttgaattgtttttttagtttttttattgtatttttgaagttttttattattttgtagaattcgtttttggtaaatgagtcgttgttttttagatgggatgttgatagaggtagtaatgtgttttttaaatttttttatatttatttgaaaagaagaggtatgtataggaatggaaagaatggaggaaagaggaagaataaagatagataatcgagttgtggaggtgaggggtaaaaattattatagaattattattcgtttgttttgatcgtgagattattattgtgtaaatttttaaattaaagtaatagttgttaaaatatagataataaatttggtttggcgcggtggtttatatttgtaattttagtattttgggaggttaaggtaggtagattatattaggttaggagttcgagattagtttggttaatatggtaaaattttttttttattaaaaatataaaaaaataagttaggtatggtggtcgtttgtaattttagttattagggaggttgaagtaagagaattatttgaattcgggaggcggaggttgtagtgagtcgagatcgtattattatattttagtttgggtgatagagagggattttattttaaaaaattaaataaataaatttaatgaagtttaggttatagatttaggaaaaataatacggatgaaaaataaaaaaaaattatatggatattatattatttgtttggtatttaagggagtatgtgtttagagatattagtgatttttttttaaatataagatgatattagtttatttattagatttttttgtgatttttaagattaaaaaatggtaaagaagatggggtttggtattaggttattgaagaaagattaagaagataagaaagtaaaaaaggttttagtatagtggtttatatttgtaattttagtattttgggaggtcgaggtaggtggattatttgaggttaggagtttaagattagtttggttaatacggtaaaattttgtttttattaaaaatataaaaattagtcgggcgtggtagtaggcgtcgtttgtaattttagatatttaggaggttgaggtaggaaaattgtttgaatttaggaggtagaggttgtagtgagttgagattgcgttttagttttttattttgggtaataagagtaaaattttattttaaaaaaaaaaaaaaaagtaaaaagagaaatattttttttaattataaattgatttttgggaagtattagagtatttatatatatttaattataagtttatatatggtttttttatatttaggtagtattatattttagaaaattatggattattttatatgtaatttgtttttaagtattataggagtaaagatatagatagttatgtttaaggttttaagtttaagagatttaagttatgttataaaaattagtaattttatttaatagtttattaaggatttatttttattatgggttttgatttttattttttaaaaatatagtatagatttgattaatgtttattagtaagatatatttgtttagggtttttgtgttgtttttttttttaaaggttagagttatgtttgtttttttgggttggggtttatttatgatgatgatatatagattttttttttttttgtatttttttttgtattaagttttatttatgtggaggatagaataaaattagttttatttataaaatattagaaaacgttttattggaatacgaataaagggattaataaaaagaaaatttgaggttaggtgcggtggtttatgtttgtaatattagtattttgggaggtcgaggagggtatattatttgaggtaaggagttcgagattagtttgattaatatggtgaaatttcgtttttattaaaaatataaaaattagttgggtatagtggtatacgtttataattttagttatttaggaggttgagataggaaaatcgtttgaatttaagaggtggaagttttagtgagtcgagatcgcgttattgtattttagtttggaagatagggcgtgattttattttaaaaaaaagaaaaaaaaagaaaatttggtgattagaaaattaagtttattttttaggttaaggggtttaaacgaggaaaagttaaaggtgttttttagaattagtgaggtgttttatttgggtttttataataaaggtacgagtttgagagtttaaggtttttattaatatttttaagttgttaggtttttttatagcggtattggtattattattaggttttatggtcgataggtttttaaagaagaacgaaggaaggaaggttcgttgttgtttagattagagtgtattcgaaagattttttagtattaatttttgttttaatatttaaaaagttttttttgtatatatatatatttatatttgtttttattttttttttgatttcggggtatagggagagaaatataaagggtaggagatcgacggtttagggagttggaggacgagaggtgggaggggttttacgacgttaattataataagtagggagttagttagattaggaaggaagtacgagattagagattagtgttattatcggttacggtaggataagcgttttagaggtcggaaaattttgggataacgcgaaagcggtggtcgttttatattttgcggagaaagtggtttcgcgtacgcgcgttacgtttatcgaatttttttaatttattatagattcgaaacggtatttacggggcgacggatttgttagttgattgttcgcgtttattgtttttttacggtgttttagtagaacggtataattaatttatagttaaatatatatatatatatatatatatatatatatatatttattatttcgcggtttcgttttcgatttttttacggatcgttattttcggttttttttaaatttgttatcgacggttattttcgttttttcgatagtatttggggatttcgaagcgatattttcggttttttttaggtttttaagttttatttttgtggggtacgacgagaaagttcgtagttttaaatagtgagtttttgagggcgagtcgggtcggggtcggtttaggtgggagggagtcgagtatttcgaggagtcgttatcgttgtcgttcgggggatcgtattacgtttgcgtgcgtcgtattacggatgcgtggatatttaagtatcgttttatttttttttttttttggcggcgtttacgtttgtgcgcgcgtttgagcgttagaagattgaggtggttatcgtaaatgtttgaaaaatagttattagttgggattttattattgtttcgagaggggttatggacggtcgtatggattttggattttggagatgggggattatgttatatttatttatgtttaaattttggtaggttgataattttaggcggtattgttttagttagttaaaatttttttttattttattgttttcgttgcgtttttttttttgtgttttcggaagttatttttttagtaggcgtttgggggcggtattggttaattttgttttcggttgtttggttgggttagatttcggttttgtcgggtgggcgttttaagggttgtgggcgttatattcgtcggtgtgtggttaaggggatatgatacgttttaggaaaagtaaacgtgttattaagttgtacgatttgttaagaaaagaggcgttttcgagtttgagaattgggagtaaatggagttcgagtggatagaaagataagattttgatcgtggggaatttaaaggtcggttagcgtgttttcgaaggtcgggggtggaggtattatttttttttcgtgttttttttttttaatttgttttgggttaagggtttcggtttcgcgaaattgcgagttttttagaaagatatatcgttgttggggtgtttaatttttttgggattcgtagtttatatttaggttttggttatattttagttaagagttttaataagtagttgtttaatgagtatttgtgttagtttatatattacgggttttgtgtattattttaaaaagttttttaacgagtttttaatattttttaagtgagtatatttagacgaatataagtgttagaattgataaatttaggtttataggattttagatcgagtatttgtattttattgttttaataaaaagttgttaatattttagtttatttttttgagagagggtttcgttttgtcgtttaggttggagtgtagtggcgtaattataatttattgtagtttttgtttttcgagtttaatcgatttttttattttagtttttttagtagggattatagatgtatattattatatttggttaattttatttttatagagatggggttttgttatgttgtttagtttggttttgtagatttggttttttaaagtgttgggattataggtgtgagttattgtgtttaattatattttagttttttattataaaaattttcggtcgggcgtagtgatttatatttgggaggatgaggcgggtggattacgaggttaggagtttaagattagtttggttaaaatggtgaaattttatttttattaaaaatataaaaattagtttggcgtggtggcgggcgtttgtaattttagttatttgggaggttgaggtagagaattgttttgaattcgggaggtggagattgtagtgagttaagatcgcgttattgtattttagtttgggtaatagaacgagatttttattttaaaaaaaaaaaaaaaaaatgtaaatattatattaaaatagaatagtattaataaattttaatatattggttatttaaattttgtttgttttttaattaaatcgtaagttttagttttcggtaaattttttgtggtagtttatgggatataaatttattaagttaggtgtggtggtttatgtttgtaattttaatattttaggaggttaaggtgggtcgattgtttgagtttaggagtttaatattagtttggggtaatatggtgaaatttcgtgtttataaaaaattagttaggcgtgatggcgtgtatttatattttttattcgggaattatttgagtcggggaagttaaagttatgtttgggcgatagagtgagattttgttttaaaaataaataagtaaataaataatttatcgaggaagatttattttttatagtattaattgttttagttatttggtgttatttaaggataatttatttggtaatttttattgtttattatttgagaatttattatttattagaaattaagtgttttgtaaatattattattaattatagtaaatatatattttggatttattatgtgtaagtttttgttaagggttttatgtgtattattttatttaattttataagattgatgatttgttaattttatagatgaaaaaatagatatagtagttaggggttggtggtgttttgtttgtttggagatagagtttttgtcgtttaagttggagtgtagtggtataattagggtttattgtagtttcgatattttaggtttaagtaattttttttttttagtttttttagtagttgggattataggcgtgtgttattatatcggttaatttttgtattttttgtagagatagagttttgttatgtagtttaggttggttttgaatttttgggtttaagttattcgtttattttggttttttaaagtgttgagattataggtatgagttatttgttttgtttgtagttagggtttggatatattttgtttgatattaatatttattttttttaatagttagattatatagtttttttgtagtaataaatgttgagtgaatgtgttagtgaatattgttagggtatatatatttttttaattgtaaattaaagagagtaatttatcgtgttttagtatttgtattatatttgttttaaagtatttattaagttgtattgtaatggtttgtttatatagttagttttttttttaacgatttttttaagattaggggttatgttttattcgtttttttatgttttcggggattagttagtttttgggaaataattgggatttgggatttaaaatagtttgttaagtgaatgaatgagaggtttagttaagttatttttttttagtgttgtatagtgtaataaataattagtttagatataggtttaaagattataggtttttttttggatagtttagttttttttataatttttgagaaattttggatatgttagggtgtattatggagtggttgtattcggaagagggggaggaagttttaaatattaagtaatttaggtttgggttggaaaataaggttgaagttatttattagtaggtgaaagggttaagggtcgaacgtaagggagttgaaagtagagtggattgagtagttagtaggggagagagtagttaaggtatatagagtattagtttttttttgtttgaagatgttttattaaatttgggtagttttgttttatttttatggtattatttttaattttatttattagtgttttgagtatagttaattgataattttgggcgtggatgggaaggaggtatggattgagattaggggaagtttatggtggaggttttgagggatttgggtggatggtttaggatgattggagattattttgggaaaggaagagaggaagggggtgtgagtgttgtgataatgaaagtaagaagaaaaatattagtattgtggttattaatgtagaggtatggtagaattggggggtggggtggttatttaggttgattggggaggggtaaagaggaaaagttatttaatgattttttgttatggatttaatttttagttggaaagaggaaggtagttaatatttttatttttaaattttgttgttttgattgatgaagaggttgaatttattttgtgttggaatttatttttttttgttttttttattgtttttttagtttttagaggtttatttgggttagtggtattttatcgtaggggtagtttttattaaggaggagttggtaatttttgattttgtggataatattgtttttaatatggttgttggttttgtttcgatgtagttttattttcgtgttattattcgtatgtgagtggtaaggaggtagaagtattattgggtttagtttttgtttaaagtgtgagaatttatttattaagagttggttttttagttggtatatttattatgtttggtttacggaatttagtggttgtattaattgttttttggagaaagatgtgtttaattaatgtttggtagtttgaaatttaaggagagttgggttttaataataaatataatggagtaaatagaagtcgggataggttagacgtggtggtttacgtttgtaattttagtattttgggaggttgaggcggatagattacgaggttaggagatcgagattattttggttaatatagtgaaatttcgtttttattaaaaatataaaaaattagttgggtatggtggtgggtatttgtagttttagttatttacgaggttgaggtaggagaatggcgtgaattcgggaggtagagtttgtagtgagtcgagatggcgttattgtattttagtttgggtaatagagtgagattttgttttaaaaaaaaaaaaaagaagttgggatattatggttggggtgatgtttatttttttttttttgttattattatttttgtaggaaagatgggttttgtgtgtttcggaaatggatttattatttgattgaagggagtatagattttagaattgaaggttggttttttttagtttttatttttttttgagtttggttttgtatttttgtttttatattttttttatttgttttgataggtcgttttgatatgaagattgagtttttttttagtttatgtttaggtggaattatgttgaatgagataggttagggttattagcgtttttttttttatagtgagtagggatataaggtaggaagggttggagggaaataagggagggtaggagaattttttattttgggttttatgatatttttttaggaagagttaggtgtttttaggggttttgattggtttgattttattttgtttttttagatcgtttattatattttttcgaaaagtgtgtggaggaatttaagtttttgattttttgtttggattttaaagtttttttattgatttttaggaattaaggtaaggtgttaaaattttataaaataggattaggatttataaagttttttggtgttatagggtgaaagaggttcgtgtgatgttattagagggatgtggttaagagttgtgatgttatttgagggaggtaggatgggttttgggttatttaaaagagaggtttttgagtttgtattggataaagggggtagagggttatacgtggagggaaaagagttttagagatttttttttgatatagggaatgaaagaatacgtttttttttattttattattattaattttgtttttttttttggattttttttttgtttttttttttttttttttttattatagaggtttgtgagttgtttaataattgatttgtaattttatttaagtttttagatgggtataatgggagttgagttgttggagggagaagttggagatttttagttttagtttttatttaagataataaagataattttttaatttttattttattttggggtttgtttttagacgttatttttattttttttattttaatattttttttggattttttattatttaaatttttagttggacggtgttagtaagaatagagtggtagtaatttttattttgtagtggtatatttaggatttgatgtgatatagttatttattgttgagtgagtaaatttttagtttttaagtggggattataggttttagtgttttttttatattgtttgagttattagtttttttgtattggtttttttgttaatattgtttgtattgtttttattttttttggtttttatgattattagattcgttttgtaggttttttgttatttgtggggttttatttagattttttaatttatttgtttagtagttttatttttttttcgatggtttagattttgagatttaaggaatattttgggttttttaattatttttttattgtagaggtttgtttattttgttttggttttttttattttaggagagtttttaaaggtagagaggattttttggtttttatttattattattatatttttttttttttttgtttttaaaaagtggaggtggaaaaaaaaaaaaaaattgaaggtgggagaaaagtaaaagtaaaaataatagttggtgaatttaagagtagtgtttttattgtttataaatataaatattttaaatagttttgtttttttttgtgtatgaaggggggttttgtattttcgtattcgggttttttttttatttttgaggtttttatgtttataatttgggttatgttttatattttttttttaaagtttatattttttttattttttgtttttattttacggttatagtttttttttcgggttttttttttgttttttattttttttttttaattttttatttttttagttagtggtcgttttatttttattgggttttcggaggttgatagttagtattaaggtttgtaggagattaaagaggtaggcgaagtgtaaagggtgggtagtaagtaggtttagaatagtatggagtttatgtagggtagttaggaaggatagtaggttatgtagttagaggtttagcggtttacgtaggtttagtgtgtttaaggttgttcgtagtggtcgtgagtatagggttagtagggtagaggttagtagttttagaagatgtagggttaggttggtggagatttgtagatatttttttgggttttttaagtatcgggagggagtttttggtttttttcgtagttagtttaatagttttttacgtttattaggtttttttaatggggtttttggtttagggacgtttagtttttttttaggggatatttttggttttttggtgttatttgaatttatatgattttatttgagtttgggattggtttttttagtttttagttttttagatttttgagtgttagagataggttggttttatttgagggaatttatttttttgttttttagttgtttaatttggggtttttttttgtttggttcggaagtagttttagaaatttttaatgttttcgagtttttagttttgggatgttttatattttttatggtttttggggtattattttagttattttttgaatttttcgaggagttgtttattcgtttgggttttgggtaaggcgggttaggttttattggttttcggcggttttaagggcgaggtagttagttattaagtcgtcgtaggaatatggttggggtgtgtaatgggtttttaaattttgaggttgttttttggtattatttagatttttaggatttttttagaagttagagtttttttggtttagaataggtatttgtttggtgatgtagttttattttgaatttagaagtggttttttttttttttgaatagttatgtagttttaagtgtggtaagtagtttgttttttttttagttttggggtaaaggggggtatatttaaatttatttattatttatatttttataatttgagattttaagaattttagatttgataaggtttgggttattattagagagttttttttgcgttttcggattttttttttagtaggtagtattttaagttttatttattaaggttatattttacggtgttttagaaattggggaggtagtgttttatttaataaagcgggtaggaaggtggttttaggttttaggtgtttttggatcgtgtagtttttaattgttgttttaagggattttaaggaataggaattttttttgttaggaggtggaatgaaagtgtttagtaaattttagttagtagcgttcgttttttgatttagagggttatgatttttataaagtggttcgattggttcgcgaatacgtagtagagacgcggtttttataaggttagaattaagatgtttttagagatttttagttacgaagtaaagcgcgggtttatttcgggatttacgcgttcgggcgttgtgcgcggggatcgttttcgggtttagcgtcggggtcgcggttttggggagtcgtcgggagtcgcgaagttcggaagtagttgtattaggattggaaggattcgcgggggcggtgtcgtagtttatggggcggattttgcgaatagatcgttttcgtatatttcgcgttgtttgtgcgcgtcggatcgttaaatcgagattagtaaggattaggattttaatataaatttagttttttattttttcgggttttttatgtttttttaaattcggtcgttttttatagttttttgtttttgggtttttttttatattttttattatttttttatttcgtatttaagattttatgaaaggtttttttagaaaagaaaaaatgaggagttttgcgatttgaatagtttttttttgttcgtttgtaaatttgaatttttggattttataatagtgagttttttttgtgtttattattcggtatgagtaagataagggggtgggtggtgggagagtggggaagtgtgggaaagaaaagtgtagataaatgggtggaataaagaagtttgatttaaagtttagatttgggggttagagttttggttttagtttaattaagtgtataagtttgataatcgtgggtttttttattatattggttttttttagtaaaattttatttatttttatttttagaggttttgattttttttattattttgtattataatatttgataatatgggtcgggagtggtggtttatgtttgtaattttagtattttgggaagtcgaggtcggcggattatttgaggtcgggagtttaagattagtttggttaatatggagaaatttcgtttttattaaaaatataaaattagttgggcgtggtggggtatgtttgtaattttagttattggggaggttgaggtaggagaattttttgaattcggggggtagaggttgtggtgagtcgagattatgttattgtattttagtttgggtaatgagagcgaaattgtattttaaaaaaaaaagaaaaaaattgataatatggtattttttttttttagttgtgaattttttgagggttgggaatgtttttatttgtatttttggtatatagtatatggatttatgtttgtgaaattagtgaattggttgtagttagggaattttttttgggggaagtgagatttgtacgaagttgggtaatttttggtttaggggggttgaaagaataggtgggggatttttaggagggtttgggatttgaaagtgaatttagattggtagggaggtgattttattatgttatttggagaggttgttttttttgatttaggtgggatttgtatgtggtttttaggtttttgtttggtttttttaaaatagtttttagaaaagtgaataaattataaatggttgatttatttttgatttttagttcgttttttacgaagatagagtttattgattaaaaattttaggatttgtatttgggtagattttaggaaggggaagttaaagggtttaggttagaggtttaagtttagattttagtagtagattagggttagattttattaaagttagaattcgaggtttatgtaagtttttagatttcgtttttaagttttgtttttttttttttttttttttttttttttttagtttagtgtggttattcgagggggttttttttttttagttatagttcgggtattttaagttgggaaatgtgttattcggggttggggtgttgatttgtagtttagttttttttggttttttttgaggatagtggggatgggattggtacggtttttatttcggggttttagttttatttttggtttttagtttttttttagtagtagtttgaagttcgggttggagatgggtattttaagtggaaggttgggaggttgaggattttgcgatagtgatagtaggtgagtagtggatgtgcggtggttggaattttggaagtgggtgttatagttttcgtagtattggagggagggagtaggagatttgtagagaaagaagaaaaagtattaagggtaggggaaggaaaaggggaagagttgaggttttagagggggttggtagggtagaataggatttttttagtttttttgttaaggaataaattgttagttaggtatagtggtttacgtttgtaattttaatattttgggaggtagaggcgggtagatggttttgagtttaggagtttgagattagtttgggtaaaatggtaacgtttgtttttttttttttttttttttgagatggagttttgttttgttgtttaggttggagtgtagtgttatgattttggtttattgtaatttttattttagcgatttttttgtattagttttttaagtagtcgggattataggtatatgttattatgtttcggtaaagtttgttttttataaaaaatatgtttgagtttaggaagcggaggttgtagtgagttgaaattatattattgtatattagtttgggcgatagagtgagatgagtgagattttgttttaaaaaaaaaaaaaaaaaaaaaaaaagggataaattgtttttttttttatttaatagtgagggatttaggttggtttaaaggtggtggtgagttatttgaattaattgtttatttagttatagattaaattttttattttatttttttttttttttttattattgtatttgatttgttttaaaaataaatttttttaaattattgtgggatttagagtagaatagttgaaagaaaaaaatggtaattagatttagtaaatttttgggtaaggggagggatattagttataatgattatagttaatatttatgtattgtatattatgcggtatgtattattttagtattttatatatattaatttattgaattttaataacgatttttattatttttatttttaagatgagaaaattggaatatgtagatattaggttgtttgtttaagtaagtggaattaggttttaaatttagggagtttatgtttataattatttgattatattattttgttaatttatatatgaggataaggaaagaattttttagtattgtgttggggcgtttggtgtggtgtggttgggagaggtagaatataatgagatatgggtttgagttaaagtttttttttatcggtttttcgggttttttgtttttttatggttttttttgattatgcgggttattttagggaagttagtttttttagcgagttgagtcgtatttttgttatttagtttatagatttttatttaggtagttttacggtttaggagatagtttatagttgttttttggttcgttcgagtagtatatattagtggggtttattagaaggtatttcgggcgttgatattttttttagttttttttgttttatgcggttttagtagttttttaagttttggtaggttttttttttgggttgtttttagtattcggtgagttattttatttttagttttaagggattttttttgtttatgtttttttgatgttttttttgttattgtttttgttgttggtgtttttattattttttttttttttttttttttttttttggtaggtttagtttgagatttttgggagttaggagcgttgtttttatttttaattagggttttatagaaagttcgggttgtagttttatttagggtggattttggtttttcgggttgtggttgttgttgtttatttttttagaggtcgttggggttagtggttggggtgaaggtgatgagtaagggtcgggatatggtttttgggagaattgagaaaatgatattaggtaagggaaggatgagataagtaagttaagttcgtggtgattttgtagtaattatagttttagagatttgttgggatgagaaaaagtagttaaaaatatttttttgttattaaagtaattttataatttaggattttgtagggtttaagggagagagattttgcgtaaaaatatggaattttataatatcgattttgttttttagtaaagattaataaaattttatgagattgttgtttagaggttttgcgttcggtttttatttttatttttattaataataaatattagtttttttttgaaattatttttttatttcgtaagatatattagtaggaaaaaaaaattagtttggttttttaagtttttcgcgattttatttcggagttttttttttttaaataaaaatagatgggttattttttagaagatttcggggagagttttttatacgtgttgttgtgtagttttcgtatcgtaaaatggcgttattttaattagaagagttgatataattaaatagttatacggtacgaagacgtatgcgtggcgataataataataaaaattataatttatattatttgagggttcgggcgtgcgtaaagtttcgggtttagtttttcgcgttggaatttttttaatagtaaacgagtaaagtttcgcgcgtttaggtggcgcgagtattaggatttgtcggttggggttttatttttatataacgtttttataatgtttttcgttttttttaacgtggttttcgttttaagtttattttttggagttaggaatttattttgtgggttaggaaaggtttttaggaggcggagggaaatttgtggaatgtcgagaagtcgtgtaatgaaataacgttacgtttgttttttattattattttgattagggttcgaaggttatatttagagtttaaggggaaatggagaagtgtaaagggacgagtagaatggttggtattattttaggttagcgtattgggacgttttagtttttatatcgtttattttattttatttaagtttttacgtacggagttaagtcgtatttttttttttatgaggtaggagttcggaggaaatagtatgttcgttaagggtttttggcgggattgattcgtattaggggtttaataggtaataaggatttagcggattggtcgaggataggttagttttttgggtagtagcgtcgcgtcgggattagaggggaacgtgaggagagttgcggaaagagatttagtttggttttttttttttttcgttttaagttagtttttttatttagtgagtataaaattgtattgtttagattttcgggtttcgaacgttatatttggttttcgttttcggtggtttttcgttgtgtttcgttcgtaagcgttttttttcgggttttcgtgatagttaggtcgtgcgcgggttattttgggattggtagttcgtttttttttatttagttagtttttttttttatcggggatttcgtgtttcggtatttatcgcggtatttgatttttggcgtttgcgtgttgtttttttttttattttttttaatttttattttttttattttatttcgtttgtcgcggtcgggttcgcggtttgcgttgtagcggtcgtcgtcgttttttggaagtagtaatttttttattttattttagttttggttttcgtttagtcggtgagtttgaagtcgtcgttgtttcgagttttttgtcgttgggagcggtatatggggttttcggattttgatgtgggggcgggggaggaagcgattaggttcggtacgaaggagggagaggtggtttgaggagcggaggggggatgtgtggatttcggtgaaagggatttgataatcgtttttaattcgtgagaaaaggaggagttcggtttttgtttgagaatgataaatttggaaatttttgggaaaggcgtgggggttatgtagagatttgtattggtagggagtttgagtcgaggtttttgtcggagttgatatagaggagagagggttttggttttcgggagttttagggatgtgggtcgggttggtgggttaaagtatttgttggttttttttaagtggtgggattttaaagaatgtttaattttaaagaaaaggggttgagatgtaaattagaggagttggagaggagtgttttagagtttgggttgttttaagaaagggtggtttcgaattttttcgtggttggagggtcgaatgtgggaggagggaggatattagaggtagggaaggagaatttgagttttattgatattgttttttttttagttgacgtgaagatgagtagtttagaggaggtgttttggattttttggttttgtgggtttcgtggtaatgaatttttttgtgaagtgagttttttttaatttttttatttgttagttttatatatttttttattagacgtttttttatatattttatttttatattgtttttttatatgttatttgaaaattttttattagtaaagagttttttttataaatttcgacgaatttgtgttaaagtggtaaaattggggtttaagttttgagtttgttatcgtttagtaatataacgttgggttagttaatttgtgttttttttttttttttgagattgggttttattttgttatcgaggttggagggtagtggtgcgatttcggtttattgttatttttgttttttaggtttaagcgatttttttgttttagttttttaagtagttgggattataagtgtttgttattatgtttggttaatttttgtatttttagtagagatagggttttattatgttggttaggttggtttcgaattttagattttaggtgatttgtttgtttcggttttttaaagtgttgggattataggcgtgagttattgcgttcggtttgtattttttgttattaaagtggtattgttagtatttgttttaggtggtttttaggaaaattgaaatgttatatattgaaatgttttgtttagaaattatgttgtttagtttttattttttttagttagttgagaggataaaattggtttttagagacgggatataggagtggagtagggataaagattttgaaaagaatgtttaagaaaaagattgttgtatttatttatttttagaaaagaaaagttaaagtttttatgggagagagtgtaggtgaattagggagagatataagtatttttgttgagttgggagtgagaaataagtataatagatgtagttgtgttgatgataaggtattatttagagtattttgtttaggttaaagatgaggattttgatatgggtttttttttggtttttatgttttgataggtggatgaagattatatttaggataaatttaattttattggatttaatgagtaggttttttattatcgataagttttagatatgattttggatttggagtttggtgaggtatttttagggttgttttgtgtgtgtgcgtgtattatttttttttttaaatttttatttatttgtttgaattttgaaattttttttggttttttgatttttttaattttaaatttatgttttattttgattttttatttgatttttgtttagttttgtgacgtatattatttgtttttatgttttttaaattcgtaatttagattttatgcgtttttttatgggtttggtttgttgtttgttttttttgttttgtattttttagtttagagttttattttttgtattgatattgttgtagttatgtattgaggagggagttgggagggagagtaaggagtagaggttgaaaaggtgtgaagggaaggtagagttgttttcgtttgatgtaagggttagaagtttaggtttttgggttttatgtttagatgttggatggggtaaggtttaaaagtaggtgttaggtaaattgaatagttcgtagtttttggatatgggtagggtatttaggaaagttgaaaaataagtagttgtatttggtcgggttgtgttttagatgaagaattggaagataattttaattagagtgatttgattgagtaggtagtcgagatgttttatggattgatttacgttcgttatatttttattaatcgtggtatcgtttagatggtgaggtttttttgtttttatttgtttttttttgagtagtaagagatataggtttttgtagtaagaagttatgtttaagttttgtttaaggaagttagttgagaagaggggaagaattttagaatttgggtttgggaattgaattttgattgggggttattttgaagggattgtttttagggagggagatagattttgaattagagagttgtgatagattgttttttttttaaggaataaataataaatggttttgatggtttgtagtttgtttaattggaagaaaggtaatatagaagtttgagagtttatttagtttagagaaggggtttttggatagaggtgggaggagtgggggatagagtggtatgggttgggttgcgaagggagttgttttttttttatatttatttgttaattttttttattgtatttattttagttggaaaagtattagtaaggagattttggttattgttttcgtgtgtattgtgagaattagttaatgttttttattggtgagtgttgaagaagggaaaggaaagtatcgtgtggtagttttatgggaaggagttggggtttaatatattggagtttgagttttgaggggaggttaggtaggaatagggggatatttggtttgttgagtttggttgttttttaggttttttagatattttaggtgaagttatggtgaagttttattgttttaagtgtatggatgtgtatatatttaagttattaagatattattatacggatggcgtttatttcggtattggttttttttatatgttttttatggtgtatttcgagtatcggtttaagagatttgttaattagtttgtgtttaggtagggagtagggagagttattaagggttaaaggaaaggtttaagattttttagagaggggaggatagggtatggtttttttttgaggtttgttttttttagaattagggtatttttttgttgagtgattgtgggaaagttatttgattatttgtgtttgagttattttattgtagaatgtttttgagttgagaagttgggaattacgaggttttagttttgagtaggtttatagaggagtttaggtggggaggtgggaatgtaggtgattggtagggtttggatggggtttatgttgttgtttttttgatttttgttttggtttaggttttacggttttaagatttattcgatggtttattagttgtagttttaagtcgttagtaattttaagagtttagttaagacgattcgttgatttttttttttatttgttttgtagtttttgatttttttttttttttttgttatttttttaggaattttgtatggtttttagtttaaattaaaggagtcgttattgtggtgggaatatgaaataaagtagaagaaaaggttatgagttagtttgttggtgtttgttgttggggaagggaaggtgatggtgtgttggattttaggggtttttatggtttagtttattttttttagattgaaaattaggatagatttgtgtttagtggattgggtggtgtttttagtatggagtagaatagaatttttaggattgcgtgtgatgaaatgtaaggttaaaaggaaaagataaagtatattttaaagatgagaaatatttgtttggatatttatgattgtttgtttatattgtaaggggtttaattagtagttttattttttagttttagttttaaaggaaaagtagtttaaagttagtttaattaaagggtggaacgaggtgggataaggttcggaattgttgtttagtgatgtgtgtgtgtttgtcgttggtggagttgagattgtttattttagaaggatggggatgtttgattttttggttaggttgttttagtatagtggggattggttttgttgtatgacgaagatagtatatggtggtagagatagatattaatttatggattttttaagggagggaataggtttttggagggtatgtaagataaaggtagatattggataaagaattcggtagtgtttaggtattattttatttgggttattatttttatatttaggaattagacgttgtgggtgaggatatgttgttttttttgttaagtaataattttttttttagttaggattttgttttaagtaggaatatagttttgtatttatagtagtttttgtttagattttgttaaaattattttgtagtttaggattaaggagtatggttataggaaggtggggttttagggtatttttttaggaattgtttatttttttagaattttaaaatgaaggtttatatgtttgtaggtgtgttggttatggtgggttttatagtaggaaagggtaagtggggtttaggggtagggagggaggaaggggtaattgagtttaggaagggggtggagcgtggttatggataatcgggttttttattggtttagggtatttgagagtgatttagtgtttttatttttttttttgtttttttagtttttgttttcgatattcggacgtgttatttttgtttcgtagaagatttttttgtaggatgtattttaggtttagagaagtgtattattagtagtttatttttgtgtatggtgattattatttattatggtaaataaggttttaggaaggggttgttggtggggtagttaatggtttggttttttttttttttatagattagggttgtttcgggtatggggtataagaagagaggaggggttgagtgtaatggtttatgtttgtaattttagtattttgggaggttgaggtaggtggattatttaagttttagagtttaagattagtttaggtaatatagtgagattttgtttttataaaaaaatagttaggtatggtggtatgtatttgtagttttagttattcgggaggttgaggtgggagattttttaaatttaggaggtataggttgtagtgagttaagattgcgttattatgttttagtttgggtaatagagttagattttgttttaaaaaaaattagaagaattttggaaggaggggtttaaggttttagggggttagtagagtttatttttttagttttttgaaggattttgggttagaagtaaattaggtttgggtgaaggatgggaaaagttagtagtaggggtttttggattatgggaagttattggaaggggttattagttttttttttttttttagatgttaaggttcgttttatcgttcgaggttgtggatagtatattttttatcgttgttaagaaaaacgtaatatttattttgtagagtattggtattaggtttagtgttgttagtataattattgtaatttttggttaagtttttaattttagagttttttgtcggagttttatgataggtttttggttttgtttttgtttgatttttagatttagtggttttattaggttttgaatttttttttgtttttttttaatttttatgttgggacggagtttgatggtttggattttatggttatattgtttttgaatttgggtttgttttttgttgagttgcgtcgtatgtatttgttttttaatagtttaggatttttggtttttttttaggttggatttttgatattttattttttttgaattttatagtgtaaatatttttttgtaatatttttagtattttgtattgttttttttgaaaatatttatattttttggttattgtgattttttaggttttcgtttgttgtattattagtatttatatgatttttgtgtaatttttttttttgaattttggtgttgtttttttgtttgtttgagataaagttttgttttgttatttagggtggagtgtagtggtatgatttttgtttattataatttttatttttcgggttttagcgatttttttgttttagtttttcgagtagttgggattataggcgtgtattattacgtttggttaattttttgtatttttagtagagacggggttttattatgttggttaggttggtttcgaatttttgatttcgtaatttgtttttttcgattttttaaagtgtcgggattataggtgtgagttattgtgtttggttgagttttggtgttgtttttttttttagaaaagaatttttagtgtggattttgtttagataggttgatttgagaaaggtatagtggtttttttattttttttttattatttgagtgttttagtattttttattttttttaatttagttatttgtttattgatatttagttttgttttttttgttttgtttatgtttttaagatttagtattagattgaattagtagtaagaaggacgaggaggtcgggtatggtggtttacgtcggtaattttagtattttgggaggtcgaggtgggcggattatttgagattgggagtttgagattagtttggttaatatggtaaaattcgttttttattaaaaatagaaaaattagttgggtgtggtggtatatttttgtaattttagttatttaggaggttgagataggagaattatttgaattcgggaggtagaggttgtagtgagtcgagatcgcgttattgtattttagtttgggtgatatagtgagatttcgtttttaaaaaaaaggatgaggaatagaattttgtgtagatgttttgatttggtaattttgtgtttttgttttattgtttttattaattttcgtttgttttagtgttgttttgttttttgtttttttttgtttttttgttagtttttggttttttcggttttattttattttattgagttttgatatttatttttttaggggtttgtgagaggagagggaagggtttgttttgtttagttttatgttttttatttttttttataataaattgggattgggttaaaattgtgttatattgtttgtggggttaggtttaggtgtgggtaggtaaatatagattaaagaggtttaatgtttggcgtagtggtttacgtttgtaattttagtattttgggaggttgaggtaggcggattatttgagattgggagtttgagattagtttgattaatatggagaaattttatcgttattaaaaatataaaattagtcgggtttggtagcgtatatttgtaattatagttattcgggaggttgaggtcggagaattatttgaatttggaaggtggaggtggcgatgagtcgagattgtattattgtattttagtttgggtaataagagtgaaattgtgttttaaaaaaaaaaaaaaaaaaaaaagggttagtgaggtttgggatttaaataggattgtagagttttttttattgtatttggcgtttgtcgttttttttcggttttttgtaaagggtatatatttttttttattttttgtttagttggagattaaagtatggggattgtgattttttttagttttaaatatattttataaaatttggaaagttagattttgatgatgttaggtttttttatttaagaaaagaaattttaggttaggtgcggtggtttatgtttgtaatttttgaattttgggaggtcgaggtgggtggattatttgaggtcgggtttgagattagtttgattaatatggtgaaattttgtttttattaaatatgaaaaattagttgggtatggtggtttatgtttgtaattttagttatttgggaggttgaggtaggagaattgtttgaatcggggaggtgtaggttgtagtgagttgagattacgttattgtattttagatagggtaataagagcgaaattttgttttaaaaaaaaaaaaaaaagtttgggcgcggtggtttgtttgtaattttagtattttgggaggtcgaagtaggcggattatgaggttaggagttcgatattagtttgattaatatggtgaaagtttatttttattaaaaaaaaaaaaaaaaaaattagttgggtatggtggtacgtgtttgtgattttagttatttaggaggttgaggtaggagaatcgtttgaatttgggaggtagagtttgtagtgagtcgagatcgtgttattgtattttagtttgggtgatagatcgagattgtttttaaaaaaaaaaaaaagaaattttttttttaaattagaaagatttaggaatttagagttatatgttagagttatttgttgttggggttttggatttttgttattttttagttttttttaaggattttggtatttaggatgttttttcgaggggtttaatttgaggggtaaagtgttgagagtattgatgttgggttgtagtggttggatttttatgttaatattttaattttgaaatagtgtaaacgtatagaaagtaaggatggatataatagttttttttatatattggataaatatgttggatataacgttgttttgagttaggtttggtattgagtagtaggatttttagatgagtatagttaggtgtttgtttttttaagttttgtagtttagtgtttgggttatgaaatttttttttgaaaagtagtgtagttttgtggttgggaggtttaattttagtttttttattatttggatatgttagtttttttagttttattttggttatttgttaagtagggatagtgttttagatgattgagaaaatatatgtaaatgtgtatatataagtagaagttaaggtttttttttttttaaaaaaatatatttgttttagagttaaatgtatatataatgtttagtttttttttttaaggtttttattatgttgtttaagttggttttgaatttttgggtttaagagatttttttgttttagtttttaagtagttgggattatagttgtatattattatgtttatttggttgatttatttatttttaaatttttttggtaaaatatttagaagtttgtatatattataagatggatttttgtaaattatatatttgtgtaattagttattaaattagcgtgaagatttttattcgtagttaagtttgtttttgttttttttttttaggtgttttttttagttttggggtagtcgttgttttgattggtagtagtttagatgagttttgtttgtgtttgatggaaatggtatcgtacgtatttgtttttatttatatagtgttttgtatacgtgttaataaatttgtgtggtttgtattttgacggaaaatattaaattaatgataattaagttatgaggtagttggcgtataaagagaggtataaatttttaatgtgttttttaatttttattttgttaagtttatttttttttatgatttttgacgttagtataagatagagaaaggtttaggtttatagtaggttaatttggaagatatttttagaggttgaagaatttggtttagaattgaagagattaggattttaataaggtttaatatttttttgagagtggttttttcggttcggggtgatttacgtttgtaattttagttttttgggaggttaacgtaggtagattatttgaagttaggagttcgagattagtttggttaattggtgaaatttcgtttttattaataaaatataaaaattagttaggtgtggtggtatgtgtttgtaattttagttattcgggaggttgaggtagaagaattatttgaatttgggaggtagaagttgtaatgagttaagattatacgattgtattttagtttaggtgatagtgagattgttttaaaaaaagagtggtttttttatttatttttttttatttgggtttggttttttcgtagttttttttttattaatatagttttttaaacgtttttagtttttatatagttttggtttgatagtattgtcgaggatgtttattaattttttggtattcgttataggagggtttttattttttttttttttttttgtgtttagagtaaattatatattaaggtaggataagaggatagtttagtagagttgggggttttttatttgatttatggtagggtagttaggtaggtgtattttttttagtttttatttttattagaagaaagagatatattaaatagtttatatataaatttatttgggagaaatatttagggattaggggataagagaggaaatttggtgggtagtagggttgggggtatagagtagtagtaagtgtgttgaagggcgttaattaagaggaagagttaaggttggggtttagtggttggagggaggtaaggagggttggtatgagggattagaagttttggttaagtttagatagaagttaggaaggtggttggaaattggtggaattttatattaaagtttgttgtagttatattaaggagtatagagttttttgttttgagggttattgtagaaatttaggaagtagtattgagagaatatttagaagttagatatcggagaagttcgggtatttgaataattatttatttgttttttatttcggtagttatttattatgacgttagaatcgttgtttggggagggatagtgggtattagtgatacggaagtttttaggaagagttttaaatttttttatttttatatttataagttaaaaaaaaaagaaaaagaaaagatttttgtagttaggtatgggtggatatgtttagtgtttattagttatggaattttattgaagtttttatgtaaggttggaggaaaagagttatatgaaatgtaatggttggagggggagttgggagttattgagttaagtgaggagaattagtattataggattatgtgagaaaaagttgggaaatgttttggagattgggtggtaggaaggaggtgtattgttatttattttttagattaaaagagaataagatgatgtttgttgttgttatatataatagagaaaaatttttgtgtttgtattttaagaagttatgtttagggatgtttgttgttgttttgtttgagagaaatgattaaaatgtttattaatagtgggatggggaaattagttgtgatatgcgtatgttatggagtagtatatagtaggttaataaaataaggaagttgtttataaattgatatcggaatatttagtttttttaatttaaatgtggaataatgtttatagtgggatgttattattttgggttggggcgggggaagaggtgaaaaaatagtaaatagtatatttgtgtagggtggaatgtgtataaaagattgtaggagggattatttagaaagtaaaaaaagtggttatatgtgtaggggagttaggtgggttagggtagtagcgggagattttggtttgatggtattgtatattttgatatttgatttatatttgtgtatcggttatgttaaaagggtagtaagaggatttgaatataggtagttgtatgtagtggttgttgagagtattatttttggagttattataaattttggtttagtatttgtgagatttaggtaaggttatgatttttttgtatttgtttttttatttgtaaaatgtatatagtaataatatttgttttagcggattgtaagtgtttagaatagtgtttagtatatattatgtgttacgtttttgttaatttaagaaaggtggggggtcggtggaagagtaggtatcgggaaggagttaatttttagcgagggagatgtttagtggttaacgggatatgaggagagcggtttgatataatatttagatttagaaggaagtggtatgtggttgttggttgaagttagtaaagtagataaaattttttgtttttgagtatatgaagtgggaagatagttaaggattaaattttggtgaatatgaattattaagggttagagagaaaacgttttatgaaggagattgaagaagtcgtggaggatgtaggagaagagtaatattagtagtaattgtagatagatgcggaagtagatagtttgaggataggtaagggtatttggagatttggagggttttcgttaaagttgcgtattttgatagggtagaagttatttagttatagattgaggagagaaggttagtggaagtggagatagagtgtggttttgaagaaaagggaagagaggttgggtacggtgtttacgtttgtaattttagtattttgggaagttaaggtgggtggattatttgaggttaggagttcgagattagtttggttaatatggtgaatttttatttttattaaaaatataaaaaattagttgggcgtggtggcgtgtatttttaattttagttgtttgggagattgaggtataagaattgtttgaattggggaggtggaggttgtagtgagttaagattgcgttattgtattttagtttgggtgatagagtagtaaaaaaaaaaaagataggattggagtaatgttttatgggattatgggaataagatttggggtgtagtttaggaggttgagagagttttcgtttgggagagtgttgggtttatgataggagaaggttatttattgttttttttgtggagagtgatgtagttgttgttagttggggtgaggtagatgttagattttagaaggtattttaattttttggtttttaagaggtatcggtagtagcgtaggtatttggggaatggaagtggttgagggggtttttaattgataggaataaatttatttagaatatagagaagtgttgattttatttatattttattttattttatattttattattgtttgattttaggttatttagttttatttttttttttttttttgttttagaaaattattaaagttttaattttttgtttttttttttaattgtatatatatatatttttttttttttttggttttaaggttagattatatgttaataaatttttagatttagtagagtatttggtgttaggtagaggaaagtgttaaattaatattttgaattttgtgtttttgtggttggtgttttgtagttaagtggggagtttagtaggttggatttagttttgttttattttgtggattttggtttttttatttagtatattttttaattttttttattttatgttgtttttagatttagagaggatttttttagtatttttatttaggttattgttgtgaagtgagatagttttggggtggttattagaaattttttttagaggttgggtgcggtggtttacgtttgtaattttagtattttgggaggttaaggcgggtaggtatttgaggttaggagttcgagattagtttggttaatatggtgaaattttatttttattaaaattataaaaattagttgggtttggtggtttatgtttgtaattttagttattcgggaggttgaggtatgagaatcgtttgaattcgggaggtggaggttgtagtgagtcgagatttcgttattgtatttcggtttgggatatagagcgagattttattttaaaaataataataataataaatttttaaaaatttttagattgtatattagtttatgagtaggtattttttattaaatttatttgttttatttttttttttgtatgggtttatttgagtattttggataggtgtatttagatatttggtgtttgtgggtttttttatttaggttaggagatttttttgaatttttggagttatttattaaatattaagtttattatgattagtattattaagaggatcgtgtagagggtttgggggttgttgtggaagtataggggatttagattttggttttttgtagggtttgttataaaacgtatgattgtttgttggtttttagtttgggtttatattggtggaagagaggttggttaagaggaaggagagaggtaatattagtttagggtggaaattagtgttagattagttagaggggtagaatgttcgtatttatagttattttggggtataatattttgtttgagggtaggggattagtaataggggaatgagaaaaggaattgttttttttattaattggatagatgtttattgaattattgtattagatgttggggatataattttgtataaagtttttatttttatagggtatagtttagtaggggagataagtttattagtaatgatgtggggagggtagagtgttgttaggagtatttcgatagttaaattattgattagagggatttcggtagaggagtaatttgatcggatttttgtttataaaagattgttatggttgtatattgtatttgggttaagagtggaggtcgtcgggaagtaggacgttattttcgagttcggttataagatggcggattggttcggtagaagacgagtagggacgaggaagcggggttaatgaatttgagatatagttagaagattggatagatttgttgttggattgaacgaggggtgagggaataggggtaggtttgtataaggaagtggtattattttttaagataggaaatatgtggtttgttttaaaaaaaaaaaaaaaagtaaatagggggtgtttagttttattttttatattttggggatatttgttagatattttaaaataaggatatttggattttaagcgatacgtatttagtttagtgtttttttggggttttaggaatttagcgtttttttttattttatttttttttttgtttcgtttgtgtttagttgcggtttagtgggtttgaatttcggagtttatagaatttggcgttgggcgttcgtttttcgcgtttgatcgtattttagaatttcggtaggacgggggggtggtttttcgtttaagttttgttttttggggaagaaatttggaaagtgcgaatcgcgcgtcgggatttaagcgtcgggttttagcggatattcggagttcgaagcggttttttaggaaggcggcgtcgtagcgttatttttttttttaggcgaattttggagatcgcggttttaggcgttttatttatttttttcgttggggattcgttgggttttttatttacgtttattcggtttttattttattagtttagttttgatttagaaatttagggtttttatttttaggatcgttgggttgtgcgttaggggaggaggtggtttttagcgttttggaacgatattatttgttttaatttttcgtttggaggttttggtcgaggtttcgaattcgggttttttgttattttttagattatttaagaattatttagttttaggatgataagggggaagatgggaagaaatagacgggagacgttcgtttagaaagattgcgggaagaaagaaattcgagaggaaattgtacgttattgagcgttttttaaaagttttggaatgaatgaatttaaaaattatattagggtcggattgcggtggtttacgtttgtaattttagtattttgggaggttaaggcgggtggattatttgaggttaggagttcgtatttagtttggttaatatggtgaaatttcgtttttattataaatattaaaaattagtcgggcgtggcggtttatgtttgtaattttagtattttgggaggttaaggtgggggattattcgaggttaggagttcgtaattagtttgagtaatatggtgaaatttcgtttttattaaaaaatataaaaatattagttaggtgtggtggcgtacgtttgtagttttggttattcgggaggttgaggtaggagaattttttgaatttgggaggtagaggttgtagtgagtcgagatcgtattattgtattttagtttgggcgatagagtgagattttgttttaaagaaataataatataaaataaattgtattagagaaaagttagagtagtggagaattgtagaggaacgcggggtatttatataaatgttttgaatgaatgagtgtatagagtgatagataaaaagaattagagggtcgggtttcgtggtttacgtttgtaattttagtattttgggaggtcgagttgggcggattataaggttaagagatcgagattattttggataatatggtgaaatttcgtttttattaaatatataaaaattagttaggagtggtggcgtttgtttgtagttttagttatttaggaggttgaggtaggagaatcgtttgaattcgggagacggaggttgtagtgagtcgagatcgcgttattgtattttagtttggcgatagagtaagatttcgttttaaaaaaaaaaaaaaaaaaaaaaaaaagagagttagggttttttttgaagcgaagagggtaaagggtaaaggggaagtataggggaatttcgcggcgttttttgaagttttttttcgaatataatcgtaacgaaaaggttaacgattagaggttttgcgaggttgaggttgggtttcgggaggggattgttttgagaggttcgggaggatttgttgtggaatttaagcgatcgtgggttttgagggaatcggggggtaagatatttatttagtattcgcggaatattttttcgaattatttcggggaggggtgaggtcggggtagggtggggtttttttcggagggggcgcggttttcgagtaattaatttcgtttttgttgcgttttgttttttttttgtttatttagtagggttagtttagggcgcgttaagagtttagagagttcgtttttatggtgacgggtttcgcgaaggtttttttggggtgaagaggtagggcgttgaataatcgttatggcgatagtagtagatgacggtgttttttttgagtgtttttatttagagttaagggatatttgagggtaagtaatcgagtgacgaaataaagaaggcggggtttgaggatagaacgttaaggttaggggaatggagttaggtaaacgaggggcggggttgtagatgattcggtcgggagagggttacggtttgttgggggagcggttcgagattgcgttttagagaggaattagagagagggtttttaatttaaatataaatgaatgattggatttttgaagaattcggaatggtttgttgattggatagatggatggatggatggacggacggacggatcgatggatggaaatttggttattattgacgtttgagttttttatttttttgggttttttattttcggagtttttattcgtttgtgatagttgtacgagaaatatatgttttttttaggagtaaatttttaatttaaataggtagtatagagttagtttagtattttatattggaggtatttagggtggagtttaggtcgatgagacggcgtaggatgaggttttttggtttagttgggaattatttttttttagatttttcgtttagagtttaattttttttttttttagcgttattttttttgttagtttgtttagttttttagggtgtttggatttttaggttttattttgtgtttagtatagtagggtttagcgttttagtaattgggaaggtttgtatttttgttgattattttttggaattgttggaattttgttatatagggtgaggagtggataggggtttgtttttatttttgggtggggattagttttgaaaataaatatagttgttttgaattttattgtatagggagtaatttgaagtaggttgaggtttttggatgggggggtttagaatttatatgttgagtttatttttttttttttatttaattttaggtatttaagggttttttaggttatttattgttgtttataattatatgtagtaagatgggggaaagtggtagtaggggtagtttagtagagtttttaatggttatgtttagggaggggtgttttttgtttttagggtatgggaggtgagattgggtatttttatttgttttttttttttttttttgagatagagttttattttgttatttaagttggagttcggtggtacgattatagtttattgtagttttaatttatcgtgatttttagttaagcgatttttttattttagtttttagagtagtttggaatacgggtgtatgttattatgtttgggtaatttttaaattttttgtattgatggagtttttttatgttgttttgtttagttttgaatttttaggtttaagtgatttttttgttttagttttttaaagtgttgggattatagatgtgagttattatgtttagtttttttttgtatttaaggagttttttttagttgaataaaaatttagtttttaggggattaatttttttgttggatttgggaggatgggatttagaattgtgtagttggttttagagttttatgttttatattttttatcgtttgtttttttggaatgggatagaggagagggtattagtattagttatttatttgtttgttaacggtggagtattatggagttgtggttatttgttttttttaattttaaattttaggtattatattatttgattaagttttagatttttatttttagtggagatttagtatatttttttttaaggagttgtagcgttaatgggggtatatatagtttttgttttggggttttaagaagagttttatgtattgggtttggagaagatatagaaatttagttagagattttatttaggatattagaatattgtcgtttacgttaagtattttgtttaaaagaatggagttggtcgggcgcggtggtttacgtttgtaattttagtattttgggaggtagaggcgggtggattacgaggttaggagatcgagattattttggttaatatagtgaaatttcgtttttattaaaaatataaaaaattagttaggcgtggtggtaggcgtttgtagttttaggtattagggaggttgaggtaggagaatggcgtgaatttaggaggcggagtttgtagtgagtcgagattgtgttattgtattttagtttgggtgatagagcgagatttcgttttaaaaaaaaaaaaaaaaaaagaatggagtcggttgaggtgggtggattgtttgagtttaggagtttgagattagtttgggtaatatggtgaaatttgtttttattaaaatacgaaaaattagttgtgtgtagtggtatatatttgtaattttagttatttgggaggttgagataggagaatcgtttgaatttgggaggtagaggttgtaatgagttgagatcgtgttattgtattttagtttaggcgatagagtgagaatttattttaaaaaataaataaaaaattatttttaataaaataaaataaaataaaataaaaatggatttagggcgataaattttggggttttttatttggaaaagagaagtttttaaatgaagaaagtggttagcggttaggcgtagtggtttatatttttaatttttaatattttgggaagttaaggcggttggattatttgaggttaggagttcgagattaatttggttaatatggcgaaattttatttttattaaaaatataaaaattaattgggtatggtggcgtatatttgtaattttagttattagaggggttgaggttggaggattatttgaatttgggaggtggaggttgtagtaagtttagattgtgttattgtattttagtttgggtaatatagtaagattttatttttaaaaaaataaaaaaaattgttaggtaataaattaatgggtggaagagggatttatttattgtgttttataaggtttaaagttagagatagatggtagttatagggaattaatttttttaggtataatttaagtatttttttttaatagagtcgtttaaaaggtaaagtatggttttgagaagatatgagtttttggtatttggtttttcgtttttggtagggtttgtgtttgttgaattgtaaaaaggttgtgaggatagagatttgatgatatggtaaggtgggtgtgtagggtttgttgtataagacgtggggagtaggtttttttttattttttattaagataataagaggtgagtaatgaaaattgggggtattgttagtaatattatgtaggttgaatttggaaattagtagaagtattgggtaggtgaaatcggattttagaaagtttatgagtcgtaagtaggagggggtaattatgggtttttggggtggttgtatgtaggaagaattgaagaaggaggcgggaggggttagggaggttgtatagttgtgataatagtaggtatattagggatcggggaggtttggggatttgttgtttgaggaaagtttaggttaggggttgaaggtttagggggatatagagatgggaagggttagattagttagattgtttagagttagggttttttaaagtttagttttttggggtttttgttttttttattatttgtttttggttttttggatatttgagaagttatataattagttagatagtagaaaaaatatttttttattaattattaggaataatttatttatgtaatgtaggatgtatgttggagaaggttaagtatagttatatgaatgaggggaaacgtgtaagaggaatagtggtgagaagggggatggttttttattttttataaattataaatagtaatatgaatatagagaattataaataagagggtttttttttatgtttttttttattttatttttttataatgagttttagttggtttttagaggtgttagggtatttggaagttttgggttgggagtggggtgtagtgagtggttttaaagttgtgtagatgttttcgagtttgaggaaaggaggtgggataggtggggtatagagtattgttgggaggggtagttattggattttttttttattttttattttcgtatttattatttattttataaaagttgttatttttaatgtttatagggtatttttagtttttttatgtgagttttggttatttaagaattttttttattttttattttttagtttattagaaataaagttagttgtcgtcgtttatttgtatttatgtttttttttgtagagaggaggcgtttaaaataggttatatatttgggtatttattttttttttaggttttttttatttttttttttgttttaggagttttttatttacgttttaggggaagtcgggttcgtgttttgtttggtaggagcggaggatagatagatattagtttttttttattttttatcggttataaattgaggttggttagggagagagatgatagttagttagtaatttgattttgttgggttttcgttttaagttttattggatttttttttatttttttttagttgtgaggaggtttttaattattgttttattattcgaagatttttttttgttattattcggggatatttacggaggaagtgttaggataggttagggttgatttttttttatttattatttttgaatttttttttttttttttttgtgttggtattagtatttgtgtgtgtatattgtttttagcgcgtatatattttggtttttatcgatgttgtaggagttttagtaggaggttattgtttcggttggatatgatgtttttaggaattttgggggtgagaagaatgtattttggaggggttggaggttaggaggaagggtttagatatttaggtttttggtgggtagaggtagaagggataagtttttggttatttttggggtttttgagggtcgagatttttacgtatttacgtggtggtgatgattttatttttggtttttcggattagtagtataggattttggtatttttagagaatagagtagtgggaagggagagtttagagggagacgggtgataattggtttatttttatttttgtattggtagtatttttattttttttttgttatagtatagtttttgatttagttttttatttaggggtgagaggggattatttaaggggtatggtttagtttggttttgttgggagatttttgtcgtgttaggttttaattttttggttgttagattttgaggtggtttagagttttaggggatttgggaggggttaggttagttgaggtggtggtagggttatttaggatgtgagttagtggttttttattaatttgtattttagtattagttttagggtttgagcgtttagtagagttgtatggggggtaggtgtttaatgtcggacgttggtcggtttttatttgtatagttgtttcgcgttgtttagattgagatgttgttttacggttttggttattaggttttttagagtgggataaaggtgaagggatggtagagataaagtttttgtttaatataaaggtttttattatttacggagaaagaaaattgaggtttttagataaaggagtttttttgtttttaataatggggcgatttattttttatttaagaaaagggagttattttagaatagtttttagttttagtttatttttttttaggaagggtaggtttgggagttgtatttattttagttgtttggtatgatttttaaggttaagggtattaggttattaaaggaggtatttaggattatggtattaatatttgggtaggatatggttgtttacgtggttggtattagggtagggaagaagagtaagaattgagaaaggtttttttttttttattatttatgtttttattttattgattttataggttaattttattttttttatgttattttttgttttttttttaatttattttatttggttagggaattatttggagaggatggggatagaatattggagatagtgtattgaagataatgggtaggaaatatttattttttttgatttttttatttaggatttgggtttgtttttttttttaatgattgggtataagaggggaaggaaaggtgaagtgtatgtaaataggatagttttttttaggtttatttagagattttattttttttttttttttttttgagtttttattttattttatttttttatttttttcgggtggggttgggtggttatgaatgtgtttatagtgggggatgggagggaggttggtattagtgaagtcgtcgatggattaggcgtagatgatgatgttttggggttggaagtttaggcggtggatggtaaattggattattatatttatggtattagttttattttgcgggaatggtattttttgtaggagaaagggtaaagttaggagtgtgttagtattaaaggttagtttatttgttttttttaacgtggattttttttgtagttatttatgataggtagagaaggtgtagaaggaagggatggtaggagaggttgttttttttagaagacggatgtgtataatgagatttattttttttttttttgttagtttcgtattgtggggatgggggtatggtttttaatgttgtttttataattttttagattttagtttttaggtgagtgggaggtttttaagaaatttatagttttttttttttttttaatggttgattagagggaaatagatataatttaggaaaaggaagggatttttgagatggttttatcgtgtttttagtaaagtttggatgattttagtttaggattgaatatttagttgtaatatagggggaggaaggattgagattttgtggtttatagttttttttttatttttgggggaaggaagagtagaagtattttttagtttagatgtaaataattttaagtttttttagaaataggagatgatattagaggttttgaggtagtatagggagtagtatgtgattgtgtggggtgtgtggtgggggaatggaatagaatgaaaagtataatagttagggatataggttaggggagggatgtaaggttattaaagtaaatggcgagtggatttttttttaaagttgagagatttaaaattttatttagagaaagtagaggttaggggaggttaggttagtgtgggaggtagggatatttttttttaaagggcggagataaggaggttgagttatcgttttattttttaggggcgtggagacgtagtttattttataaaatttagtattttttttatagtagattatttaggaaggaggtaggaaggaagggttggggggttaagttgggattgaaaaattttttttgggtagggagggtagtttatgaagagttttgtagggaagaggaaagggtaggtttttgttttttttaaggggaatggaagttttttattttatagggtttataagaggagaagtaaagggattataaatattttttagaggttgatttgttcgattatttagttatgttttttttttggaagattattagttggattttttttaggaaggggattatggagatgttttttttttttcgttttcgggtttgttattttttgtgattattgttattgtgtggtatgttgattgttttttttatttttttttgagttttagttttatggttagataaattgtaatgttatggcgttttaagttgaaatttacgaatggtgggatttgtatgaatttttataatagatgggtagagttaggattagaatttagttttttagatttttggtttagcgttttttttacggttgttttatggaggtaggagattttgaggttaggttgtttgggtttaaatattagttttattatttattgtgaggtttaggaaaggttttttgtgttttagttttattttttgtaaaatgggttaatataagtagtatttattttacgggatttttttgagaattaaatatatatgttttatatatatatgagaattaaatatatataagtgtgaagtgttgttaaagtggtaattattaatattagtttttcgtttttgaacgttttttttattttatttgtttttttattatagggttttattatattataaggtttttagcgtggagttaggatatgagattatttttagtagtggtttttttagggaggtgttatagtattggggtttttagatttttattgttttttttatatttattttatttttgggttttttgtttttttttattagtttttgtttttggggtttagttgtttttcgtcggtttataaatatggtgttaattttattgttattataggttagtagttttgttcggcgtttattatattgagtacggaagacgtaatggttaagatgtaagggttaggaggttatattataggggtggggcggggtgggtgggggtgagaggggagggttttaggggatgtgcgggtagggaagttttattttttttattagtcgggtttggttttgtagtagtataggtatgagggttttttgtagtaggtatatagagtttggatatagtattcggcgttttagggtgtgcgttattaggtagttgtggggaatataggttaataaattttaattttggtgaggtttggggattgtgttggggattattttagttttagtatttatagattgtaaggtttgttttatttttgatttttatagttttattttttttttttaagttttaatgaaatatgtattaggttagtgttttgtaaattttttttattgtaatttttgtaagataaatattttatattgtggtttagtgtatatatattttgtatgtatagaattttgagagttttatgatgtaattgtttatatataataagtaaatgtaaagttattattagattatgattttgttaaaatataagtataatatattaaaggtttttaaataaataatgttttaaaaaatgatggttataatttaaaattttaaatatggtttgtttttttgattaattagtatattgttaataattaattattaagtttattttgttttttggtattttagaagttgttttttaatttttagtaaaagaaaatttttagtgtttgttttattataagatataggtggttattttcgttttttttgatattattagtatttacgattgagttttatttgggatttattatgtgtttttaagtatttaggtaaggtaggagttttttagaatatgttattttatttaatttttttagtaattttgtagggtaggtttattataggtgtagatattgaggtatataggggttcggagttaaggtggaataataatagggtagaggggttacgatgggtatatagatgttattagagtttgttttagttataagtgtgtgttttttttatttttattttatttttattgtttttttttagttttattgaaggagtttttgtttatattttagttttttatttattatatttgagattttagatttttttgagttttttttttttaaatataaatatggataaaaatgattttgttataaatgatttatataaattatatagtattaggtttaatgagtgatagttattttataatggagcgtttatttttagagtatttttgaaatggtttttttattttagtgggttttttttcgttgttgttttttatttggtgatttgataaggtagttttttaattcggttgaggagggtgtttgttgtttttcggtgtaggggttttgggcgaagtagggttatatttcggcgggaagggttttttcgagatttttttttgaggaagggaaagatgtagggaaggatagggttaggagtagtaagttggatgtttgaggtttggagaatagtggggtttaggaacgatataatggtattggaaggtaggtattgtgatttgagagggtatggaggtgggagggtagagtagagattttttggaatggttttaaggggagagatatagtaaaagaattggggttttatcggttgttgggttttttttagtggaagtcgattggttagtttcggaagttaaagttgtagttggtaagttgtttttgtagtgggtacgagaggtaaaggggtattgagaatttaggggaggtttttttatttatttttaataatattttcgttatttaggggtttgatttttatatattatggggaaattaagcggaggttaatatttttttaatttttagatggaaaattttaataggattagaaaattaggggagatggtatgttttattaggtattaggattggtttgtttgtttttttttaagttaagaatttaatattttgtttttttaaaaaattaagtttgatttatttttaggaggagtggttgaaggtgttagtgtttttgagtgacgggtagtaggggtcgttggttggttacggtttattttttatttgggttttttatagggtgttgttttagaagtttagaaattttttagtagattatattgatagatttaaggttgagtgagatagagaggagggaagttacgtttatagtgggtttttttgttatgtggggttattcgttgaaggaagttttgatttttatttttataattatattttttttttaatttttgtagttatggattagtgttgttttatagtttattcgaatttcgggttattttattgagttagtttatatgtttttttttttttttttgaggtagggtttcgtgttgttgtttaggttggaatgtagttggtgtaattatagtttattgtagttttaaatttttaggtttaagtgatttttttattttagtttttggagtagttgggattatagatatgtgttattatgtttagttaatttttaaaattttttttagagataaggttttattatgttgtttaggttggtttttaatttttgggttgaagcgatttttttgttttggttttcgaaagtgttgggattataggtatgaattattttattagttttacgttttttgacggtagtgggagttgtgtttttttttttttttttttttttttttttgagatggagttttattttgtcgtttaggttggagtgtagtggcgcgatttcggattattgtaagttttgtttttcggttttatattattttttcgttttagtttttaagtagttgggattataggtgtttgttattattatgttcggttaatttttgtatttttagtagagatggggttttattatgttagttaggatggttttgattttttgatttcgtgatttattcgtttcggttttttaaagtgttgggattataggtgtgagttatcgcgtttggtttagttgtgttttaatatttgattatattcgttttttattttttgagtttttagtattttattttgagggtttttattttttgtatagaaattttttgatattttaaaaataatttgattaatagagagtaatagaaaaattatataaaaaggtaaatggtaaaataaaataagatgattaaaagtaaattttaggtaggttttgtttagatttgtttttaaatttggatttagttatttttttgttttatgatttcgaatgggttatttaatttttttttgtttttgtttttttatatttataaataaaggtaataatgttattttatttagttgttgtgaggattagaaagggtgtgtgttaaatgttttagttagtagtatagtatagggtattattacgtagttttatagtgtggagtagttaggaatgtgatgatggtggttatagttgtttgattttagaaattttttataatagaaaagagttttatggggttttaaagtttatttttaaagataattatagtttagtattagtcggtttggtataatttttaagatattgagttttagttttttttttttttggtattatgttgtatttttaggtataggagtggatatatttgtttattttgttttatttataaataaggatagtatggtatttaatgtatataataaaattaaatatttatagaattgagttgttgtgatatagagaaaattattttttaagaaatattgtgggttgggtgtagtggtttatatttgtaattttagtattttgggaggttaaggtaggtggattatttgaggttaggagtttgagattagtttgattaatatagttaaattttatttttattaaaaatataatattagttgggcgtggtggcgtatgtttgtaattttagttatttgggaggttgaggtaggagaatcgtttgaatttaggaggcggaggttgtagtgagttggaattatgttattgtacgttagtttgggtaataagagcgaaattttattttaaaagaaaaaaaaagaaatattgtgggttaggtatagtggtttatatttataattttagtattttggaaggttaaggtaggtagatcgtttgtagttaggagtttaagattagtttggttaatatgatgaaattttgtttttgttaaaaatataaaaattggttaggtacggtggtttacgtttgtaattttagtattttgggaggtcgaggtaggcggattataaggttaggagattaagattattttggttaatatggtgaaatttcgtttttattaaaaataaaaaaattagtcgggcgtggtggtaggcgtttgtagttttagttatttagggggttgaggtaggataatggtatgaattcgggaggtcgagtttgtagtaagttgagatggcgttattgtattttagtttgggcgatagagtgagatttcgttttaaaaaaaaaaaaaaaaaattaattgggcgtggtggtgtgtatttgtaattttagttatttaggaggttgaggtatgagtattgtttgaattcgggagttggaggttgtagtaaattgagattgtattattatattttagtttgagtaagagtgagattttgttttaaagaagaaaaaaaaaaaaagaggttaggagtggtggtttacgtttgtaattttagtattttgggaggttggggtaggtagatcgtttgaggttatgagttggagattagtttggttaatatggtgaaatttcgtttttataaaaaatataaaaattagagggtgtgggtggtgcgtgtttgtaattttagttatttaggaagttgagataggagaattatttgaatttgggaggtggagagtgtagtgagtcgagatcgtgttattgtattttagtttgggtaataagagcgaaattttattttaaaaaaaaaaaaagaaaaagaaaaaagaaatattgtggaatgtttttagtttagttagtttttataggtgagggagggggaagattgttttagtagaatattttattagaagtggtagggaggaaaaattttttaggtggatagtttattaatggaggtgagaagggatatagtaatgtgtaagtaaatatttagtgtggtgggtggtaaaatatattttttttttttgtagaagttagtgtttggtgttttgagggataattgagaaagttgttattgggtgtttgtgtggtattttttttagggttttttattttgttttttgaagattggtttcgatgtgttgtttttaagatggtgatgaattgtcggtattgggggttggtttagcggttaatgtttggtagaaaaaggataggaaatagtgttaggaaaattgggaagtagaaagtttaggttttaggaaaagaattggagatgggttagaagaaggttttgtaagaaaaagtgaaagaaaaaggaattgagggtataggatgcggagaaatagatgtgagttaattttttttttttaaatttagtaattggttataggacgttttttttttttagtttttgtagtttgtgtttttatagataatttttaatttattattttttagaatgttttttttttttagtttttaaatattgttatataatttattaaatgatattattaaatattattatataatattatttttttttgcgaatattaaatttttttattttttattgttatttttttttaatgtttgttttttgttttttttttgtatattttagttttttgttatttggttttagagttttcgatttttgtttataattatttttttattgaatttttgatttttttatttttattttttttaattgtattatttagtattttttttgttttttaagattttttttgtttttgttttttgggtttatttttgattttttttagtttttgaatagttttttttttgttttttttttgtttttttttttaaagtagaagtaatttttagtgttgatttttttttttttttttttttatttatatagttagtgattgtatttattttttttttattgttgagttattttaaattttaatttttttttttattgatttggtaggtgtcgtgtgttagataggtatcgtattatatacgggagatttagtaggaaatgagatatatagtttttggtttttagagagttggtattttggttggggttaggtatagttaggagaagataataaataatattttagagagggataagtgttatagagaaaatataataagaatgaattagaattttatgtgttattaatggtatttttttaaaacgatatgatgagagaatgatgtgtgttgtagaatgatttgtataatatttatgttaaaaatgtaaaatgtgtaaaataatatatattgtttatagatattatattttatagattttaaaatgtatattttttaatttttgaaaattttgaaattagaatttattttataattgatggtagtttagatttgaggaattgaggtatatgttttataaaagtatgtgttagaaaaaaaaaaaatttatattaaatgataattattatttttgaggaaagaggaagatgggattgaaaggattttaatgggaattttaattttaattgtggtgttttagtattttgttgatagaaagtatttaaagtaaatattataaaattatatataaaaaaaaaaattataaaattatatattaaaaaatttaaaaaggtttttatattttgttttttggatttttttgtattttttttttttttttttttttgagatagagttttgtttttgttgtttaggcgggagtgtaatgatgtgttttcggtttattgtaattttcgtttttcgggtttaagtgatttttttgttatagttttttaaatagttgggattataagcgttcgttattatgtatagttaattttttttgtattttttttaaattaaaaataaataaaataaaaaattaagataaaattgagtagtgggagttatttttagatagggtggttagggaaggtttttttgaggagagagtttagttttgtagagattagggggtagaatattttaggtagaaggttttggatttaattgcgattatttagttttgattttattatttttatgttgaagtatcgtttattatttggttgttattttatgtatttattaggggtaggtgatttgttttttttatttttttaaattgcgagatataatatatgtatataaaatatatatttagtttaaaaaatataaagtaaatatttatgtgattattatttaggttaataaagagaatatagttattttttagtagggtttttttttattttgtttttttttattttaggtaattatttttttaatttttgagaaaattatgtttttgttgggcgcggtggtttaagtttgtaattttagtattttgggaggtcgaggcgggtggattacgaggttaggagattgagattattttggttaatacggtgaaattttatttttattaaaaaataaaaaaaaatttagtcgggtgtggtggtgggcgtttgtagttttagttattcgggaggttgaagtaggagaatggcgtgaattcgggaggcggagtttgtagtgagtcgagatcgcgttattgtattttagtttgggggatagagcgagatttcgttttaaaaaaaaaaaaaaaagaaaagaaaattatgtttttgttgttttcggtgttttattttaaatatgtatattttttttgaattttatataaatgaaaatatattgtatatattattttgtggttagttttttttatttaatataatatttgagaaatttatttgtattgtttttgtttatttggagatagagtttcgttttgttatttagattggagtgtagtggtgttattttggtttattgtaatttttgttttttaggtttaagtagtttttatgttttagttttttaagtagttaagattataggtatgtgttattatgtttagttaattttttgtattttattttttttgagatggagttttgttttgttgtttaggatgtagtatagtagcgtaattttggtttattgtaatttttgttttttggatttaagtaattttattgttttagtttttcgaatagttgggattataggtgtttattattatatttggttaatttttttttgtatgtttagtagagacggggttttattatgttggatagattggttttgaatttttgatttttggtgatttgtttgttttagtttattaaattgttaggattataggtatgagttattgtatttggttttatttgcgttgttgagcgtagttatagtttgtttatttgtattgttatatagtgtttttttgtatggttattgtatggaatttttttttttttttgagacggagttttgttttgttgtttaggatggagtgtagtagcgtaatttcgttttattgtaatttttgttttttaggtttaagttatttttttgttttagttttttaagtagttgggattataggtacgtgttattatgtttagttaatttttgtatttttggtagagacggggttttattatgttggttaggttggttttaaatttttgatttcgtgatttattggtttttgttttttaaagtgttgggattataggtatgagttattatattcggttatatagaatatattttatttattttattatttgtagttattggagttgtttttagtttaggattattataaataatgttgtatgttgtatttttgtatatttatattgtttatatatgtgtaggagtttttttagtatgtatatatatatagaattgttgtagggtatatgtattttttttagataaaagtagttaggtatagtggtttatatttataattttagtatttcgggaggttgaggtgggaggattattttgagtttaggagtttgagattagtttggataatatggtgagattttattttttaaaaaaaaaaaagtaaatttttttgttattttttagttatttttttatatttataatttaagttttttaaggaaaagattatgttttaaattatttttaatgattttttttcggaggtttattattaaaatgtatttgtataaggtatttaatttttaattagtgatagtgatagataagatttaaattaggttttttttttatttatttcggaggtaggttatatttgttagaagtagtagtaatgttttagtatagtgagaaaacggtattattttggataaatttaagtaatttgggaagggagagggataatgtgagatttttttcgtaatgttttttagtttttttttttagtttagttttaatttttattttatattttttgtttggaatagttatattttaagaggaagaagatgtttgatggaagagggaagttaagttatttttataggtttttttttttttttagggagttggtttatttgttaataatttgtttatttgttattttattatttttgaaattatattgattttttttgtataagtagaagaaggcgaagggagaggagtaataagagatggattagaatattgaagtttgtagtagagagatagggataggtaattaatatatatatatatatatttgttattttaggtatatattatatattttgagtaagatggataatttgagggatattatattatatttggtgtatgatattatgaatatagtaggtgtttagtatttgttgaaaagtagtgtgttaatgtaatggaggttgggaaaatttggtataggttttattttttttttttggaattatggaagaattatgttttttatttttagatataattttattatatttaaaggtagtttttttgtttatttaagttaattaagtttttttaattggttttgtttaggatagtttttggtttggtttttaagagatgcgtaaacgttattataggaattgtgttagaaagaatagttgtttttgtagttaaagaggttagttgttagggaggataggttattggggaattgtaggatttagtatttgtagatggttttaagagtaaatatgttttttttacggtttaggttgtttttagagaaagtagtgttatatattaaaggggagtgttaagtatgtatatttagagtgtgtttgtgtgtttgtgttggagaggtttgttgtagagtttagggtattttttaattttagggtattgttgtttttaagttagggagggttaagtttaagaggataggtgggtttgaaagatgtagagttttagatgttagggtagatatattagtgttaggatgttgttagtatgtttttttagggtacggggttgatagtacgtattttgttaaaatagatggtttttttaaggattttgtttattggtaggttttttttttttttttttagaagttttgttgtgtgttttttggttttagtttcgttgattattttttttgaaatatttttggtttttatagaaattttttttttttatttttattttgaatttaattttttatttttgattatgggaataaatatagggagttggatttggaagtaaaagtgaaagtagtattggacgatttttgttttttttttatagtttagttttaaatggattgtaggcgcgtgtatgtggggagaagggttagtttgagaagaaagaaaagatatttagataatttaagaaggaaagaaaagtattagaaataagagtagttgattaagaagagaatgtgggtaggagcgggtagtttgtaggagatagtaatataatgagataattgataaaaaggaagagaatatttagaatagtttattattattcgttagttttttagaatataatgattcgggtttttaggttaggttgggcgggggttgaggggaggatcgacggatataggatttgtaaaagttattttgaaatttaaggcgagggtaaagggaagataaaaatagagtcgggggaggtatgaagaggtattgaagaagaggaaattgggagtttgatagtaaaatttaacggttttttagttcgcgtagggttttttttcgggatttaagatttaattgggatcggtacgaattacgatatatagggtcggggggacgcggagaggaaagaataaagagtggtagtcggaatgagaaagcggtaaagagcgaaaaagaaaggaggcggttagttcgtaggcgtgattttaatttaggaagtatatagagcgtagattttgcggataattggtttgataagtaggttttttttattttttattatgggtatttttggggagtaaaaggtcgtaaagggtttggattgtattacgtttttcggtggggaggaattcgatttatttaggagttggaatggggggtagtgattgtcgttggcgttttagggacgttggtcggggtttttttagagtttttttttcggtagattttgtagagtcgggggtttaggacgtagtttagtagtttcgttatggtttcggttcgggtcgttgtttttttagtagtaggtttttttgtcggtttcgttttttttgtttttgaggtgttgtgtgtttttgacgttagttcgtatcggtttcgttttcgggcgagttgcgatatttttagtgttttttgagaagagtttcgcgtagttggagttacgggtatagtagtggttcgaaattagtggaagattattagaacgcggagaattagaaaattatcgggtatggtttaataatttttttttgttttattattggtagattttagagcgatagcggaaacgaggggtgagattaggagtatttgataagagtaatcgaaaatataaggtgtttaggaatgtatttagtataagaaatgtaaggttttatgaagaaaattataaaaagttattgaaaaggtaaattggttcggttcggcgtagtggtttacgtttgtagttttagtattttgggaggtcgaggcggggggattatttgaggttaggagttcgagattagtttggttaatatggtgaaattttatttttattaaaaatataaaaattagtttggtatgggtggtgcgcgtttgtaattttagttattcgggaggtcgagacgcgagaatcgtttgaacgcgggaggtagaggttgtagtgagtcgagatttttttattgtattttagttttggtgatagagtaagattttgtttttaaataaataaataaaggtaaattggtttagcgcggtggtttacgtttgtaattttaatattttgggtggtcgagggatgattgtttgcgtttaggagttttaggttatggtttatgtttgtaattttaatatttggggtggttgagagaggattgtttgcgttttggagttttaagttagtttaggtaatatagtgagattttatttttatataaaatattaagggggaaaaaaaaaagatttagtagggtgtggtggtgtttatttgtagttttagttatttgggaggttaaggtgggagggtcgtttgagttcgggagtttgagatcgttttatgtattttagtttgggtgatagagttagattttgttttaaaataataataataataattgaaaaaataaaaaaagaaagaggtaaacgaaaagttttttaataaatggaaagttatattatggttttggatacgaaaatttagtatagtaagatatgcggaatatttgtaaaaagaaaataaatgaattattattgttatgtatgaattggattttaaaattatgatgttgagtgaaaatagaaagttatagaagaatgtatacgtgatattagtatattagatttaaaaatatataaaatttaatgataaagtaagtggagaagaaagagaaaatttagaattgtggttatatagtatagaggatttttgattgaaacggaatattttttttttttgttttttttttttttttttttttgagatagggtttagtttttttatttaggttggagtatagtggtataattacggtttattgttttgattttttatttgttgggtttaattatttttttgttttaattttttgagtagttgggattataggtttatattattatattcggttaattttataaggttttattatgttgtttaggttggtttcgaatttttgggtttaagtgaattttttgttttggttttatagagtgttgggattataggtatgagttattgtgtttggtttggaatattttattttttttttttttttttttttcgagatcgagtttcgtttttattgtttaggttggagtgtaatggttcgatttcggtttattataatttttgtttttggggtttaagcgatttttttgttttagttttttaagtagttgagattataggtatgtattattatgttttgttaatttttttatttttagtagagatggggtttttttatgttggttaggttggttttgaatttttgattttaggtgattcgtttgttttatttttttaaagtggtgggattataggtatgagtaatcgagttcggtttggaatattttatttatttatttatttatttattatttatttatttttttgagacggagtttcgttttgttattaggttggagtatagtggtatgatttttgtttatcgtagtttttgttttttgagtttaagcgatttttttgttttagttttttgagtagttgggattataggtatttattattatatttagttaatttttgtatttttagtagagatagggttttattatgttggttaggatagtttcgattttttgatttcgtgattcgtttgttttagttttttaaagtgttgggattataggcgtgagttacggcgtttggtttttatttttagagttggggttttgttttgttgtttaattttaaatttttggttttaattaatttttttattttggtttttaaaagtgttaggattgtagatatgagttattatgtttggttaggttttttttatttttattatattgtgagatttaattttgttgtaaattattaggtttgtttatttttattgttgtttagttttttattttgttaagtatttatttattatatagttgtattttatatagtttttggtatgtatggaatattttattaaaataattttaaaaataaataaattatatattaaaattgtaataattgtatgaagatttgttttaggagtttttgtcgtttagaaggatgaattagttcgttagttttgtttttgagtaataatttaatatatttattagggttttaggagaggttcggggtatgttagataattatagggaaagttattttaaattatttacgggatattgattcgatatatagttttgtgttgggttttgtggaggattaatataaaaatttaaatttagtttttttatttatagttgatatttttttttttttttttttttttttttttttttttttttttttttttttgagatgaagtttcgttttgttttttaggttggagtgtagtagtacgatttcggtttattgtaatttttatttttcgggtttaagcgattttggtgttttttagttttttaagtagttgggattataggtatatgttattacgtttggttaatttttgtattttttgtagagatagggtttcgttatgttggttacgttggtttcgaatttttgattttaagtgatttatttaatttatggttgattttttttaggagtgaaagagattttagaatgtatttttagattgataagagttagataggtaggattatttttttgtatggttttttgtatggaaagtttttatttgagttttttagttgatgtggaattagaagagtaaaaaggttatttttagagtggtttgggttgggtttttttttttttaggatagaaaagtggtggttattttatttttagtagatatgttgttgggttttatcgttttagtatttttattttttttagagttttttgttattttagattagcgagtgtgggtttttatttggattttgttttttttttggggatattaggttttggagtaagagaatttggtaggttttttttatggtagttttatttttttttttgtttttatgtggaattttttaggttgtaggtaaggggtaagaggtacgggattttttagttatttgtaaggttggggagggattattgtttttttttttaggagtttggcgaaggtatttgatttaagaagatagaattattttaattaatttttttttgtttttgatattagggaagatttagaggtaacgagggtttaggttatgtagttttttttataaaataagaagaatgagtaaatgtttttagaaaagtagaaatgagtagaagagatgtgggtatttgttaatttttagtttttttttttttgtttttagatttttttattggttgggggagagaggaggaaagtttttatttttttttttttatttgttttatttttgtagttgttatttgagaaatgtggttattagttaggtttgtgttgggggattttagaagggaaggaagttagggttgaagattaaatggggggttattgatttgatggaggtttttggttttatataattttttttttatagataatatgtaggttatttatgtggttttgggggaggtagtagagttgttatgttttttattatttattttatatggggacgaatatttgttatggttttgtagttttgtagtaggtttttttattattttggtagtttaagtttaagtgggtaggttagttttagattttggaaaattaggaagggaatttaggtttagattgttggggaattattttttgtggttggagggatttaaagaggaagatgtcgggcggtattggtgcgttgtgttaggttagtattataattattagaattggagggtgtacgacgttttggtgtttaaaggtgagtgggggtatgtagattaggggttattgtggtttaggaagtttaggtgaagaattgaggaattttttttttttttataggattttagttatttgtaagggttgtagatggatttttttgtaatgtttttttgtgttttgtggtttttagtagacgtatggattttgtgatttggtaggaagggaagggtttcgtgaggggtcgtgtttagtttttttggggtagtgaggttgttttgtttttggtgtgttttggggaggggttttttgagtttaggagtcgaagattaagaattattcgttgttttatgatttataataaaggggttagttttagtttggtaggtaaattgaggaaggagacggaaagggatgtttttttattttagttttttaagtagttggaattataggcgttcgttattatgtttggataattttttgtatttttagtagagacgagattttattattttggttaggttggtattaattttttgatttttagtgatttgtttgttttagttttttaaagtgttgggattataggtatgagttatcgtatttttaaattttttgtagagataggattttgttatgttgtttagtttggttttaaattattggttttaaatgatttttttattttggttttttaaagtgttggggttataggtatgagttattatatttggttatttttttttgaaagaaagggtgaattattataaagggtgtgaggggaaagtgtggttatggttggtggtttgttttgtagttggttgtttatgcgtgagtagggggtattgttattttttattttttattttattttattttattttattattattaggttaggtatggtagtttaattttgtaattttagtattttgggaggtcgaagtaggcggattatttgaggttgggagtttaagattagtttgattaatatggagaaattttgtttttattaaaaatataaaattagtcgggtatggtggtatatgtttttaattttagttattcgggaggttgaggtaggagaattatttgaatttgggaggtggagggcgtagtgagttaagattacgttattgtattttagtttgggtaataagagcgaagttttattttaaaaaaaaaattgtatttttagtagagacggggttttattatgttggttaggatggttttgattttttgattttatgatttgtttgttttagttttttaaagtgttaggattataggtgtgagttattacgtttggtttttttttttttttttttttttttttttgggatggagatttgttttgttggttaggttggaatgtagtggtacgattttggtttattgtaatttttgttttttgggtttaagttatttttttattttagttttttgagtagttggattataggtgtttgttattacgtttggttaatttttgtgtgtgtgtgtgtgtgtttttttgttttttttttgagatagagtttttttttgtcgttaggttggagtgtagtggcgtaatttcggtttattgtaatttttgattttttggtttaagtgatttttttgttttagtttttcgagtagttaggattataggtatatgttattacgtttagttaatttttgtatttttagtggagtcggggttttattatgttggttaggatagttttaattttttgatttcgtgatttgttcgttttggttttttaaagtgttgggattataggtgtgagttatagcgttcggttttttttttgtgtttttagtagagatggggttttattatgttggttaggttggtttcgattttttgattttaggtgatttatttatttcggttttttaaagtgttgggattataggtgtgaattattgcgtttggttttaatttttatatttttagtagagatgaggttttattatgttgattaggttggttttgaatttttgattttaagtggtttgttcgttttggttttttaatgtgttggaattataggtatgagttattgtgtttggtcgttattttttatgggttagggtgagaggtttggaaaggggtagagtagggtggaggatattgtgggtagggaagtttataaagttttttgttggaagagtttattagattgtggaggggaagtttttttttggggtatagggatagggttttttattattttttttttatttttttggtttggtttttattatagtttttatcgatgttttttttgttttttgtgttttttttacgggttgggatatgttttggattttgatgttgttgtttataatgggttagggagttgttattttggtttttagtatcgtgttttggaggtagagggttcgtggggttttaggtagaggtgagttttttttttttcggggaaagaagagggtatatgggtgggaggtaaagggttaggtttatattttgtttttgtattttattttttttaggggagggggcgaggaatacggttttaagttgtttgttgattttttttttgtatttttgatggttttttttttttagatgtttcgattttttagtttaaattcgaaatttaggtttatgagaatatttatttggttcgttttgggtgaggaatagttagggaatagaggtttaaattttggaggggattggggatggagaggaaatacgggttgggttggggatgggttttcgtttttgaggatgtgaaaagtagaggtatttttaatttgtttttttggaaaattttatagtttatttgtttataagtttaggtgattttggtgatatttgttgggaagtgtgatttgttgtttcgttggttatttggtatttggaagatttttcgataattttagtaaggggggcgggattgagagttcgattttattatttagttggtttttagtagttattaagttgtgtatggggaggggtgggggattgaaggaaaggaggagtattattttgtgatgtaatttataaaaaggtttggttttttgttttgtagtagtagtggagggatggttttgagtttatagtattgtggggttgaggggagtttgaggttgttggtgggggtaaggaggatgggtgtgtatagggaggagataggaatttggagatttgagtaatggtggggaatttattgtagtggagttgaaggataaatggggaaaacgggggaagagagagaagggaagagatttaagttagagaaagtggaaagagatggatagagggagaaaaatagaagtataaagtgggaggatggagggatagagaaaatggaaagttttaatttatttttaaattaagttagatttttattattttatgttttatttttataaagaagagagggaataggtatatttaattaattttagatttttttatatgtaaggggagggaattgagttaggatagagatgtttgtgtttagtttttattcggggttttttttttatttttttttattttaggtatatatttttttttgtggcgttttatcggggtatttagagtatgtgagtagttatcgttattttggtattttttttttgttgttttgaggttatattttatttttcgggggtagagggagtgtttatttaggttggtaggtttagtgggggtatgttatttattgggtcggggttatgttgggatgtttgtgaattatgggcgagtttgggttggtgaagcgagggagggtattgatgtttttaatttggttattttttagttttaggtagaaatgagttgagttttagttatatttttataagtagttttattgggtgtttttttgtgtttttgtttaagtttgggttttattggaaaaaagtttttttagaagttttatttaaagtttttaggttgtaggggtttaaattaagttattggtaagaaaaaggacgaaaatgatatagatggagaatgaggggagtgtcgtggtttaggttttagttttagtttaatttattaagtagttatagtttgtttttagagtatatatatatagatatatatatatatatatatatatatatatatatatatattgtagtatttgtagtattattggatttttagatagattttttattaaaggtattttttatagttttttaagttttttattttgagttttcgatttattatattagttttttttagtaagatttttttttttattatatttgatgtttttttgatttttttgtttgagatttatagtgttattaaaatgtttgttttgttagtgatttgggttgatacggggtattagtaatgggtatttagaaaagataaaagacgtagaataggtgttttttatgaggttggattttgggtaggtgtttttttaggttttgtgaggggtttgtgaggggtttgttgagagatttggggtttttgtataaaattaggttttcgggtatgttttaaagtgtttgtgtaggtgtttttagggtcgtagtgatggcggggggtattttgggttgggggttgtagatttacggaagttagtggaggaggtgtttttttttagcgaagttggttataaagaggggtagggaggcgaggaggttggtgagttgttgtggggaagcggttatgttgtataggttttgttcgtagtagtggtgttatagagtgtaggagtgtagttagtaggtggtatagtttggtagagggtattgggtttttgagaggtagtttttttatttagtgattttattttggtttgtgggatgaaagaggtatgttgaggcgggggttataggaaaggtcggatggatggaggtagggagttttttggagaagggttattggattagagttttatttgaagtgttaatattgatgttataagttttatcgtttcgatattcggtgggaatagggtggtagggtttggtgaagttatagatgtagtagcggagtttttttcgggtaggggatatggtgagatttgttgaggtagtagagattaggagagtaggagaggtaaattttttttgtggggtaggtagaggttagattcggagagggattatagagagaggtgatatatgaagtagagagaggaaagttgtggaataagggaggaaagttgatagaagtagaaaaaatagttgggcgtagtggtttacgtttgtaattttagtacgttgggaggtcgaggcgggttgattatgaggttagaagattgagattattttggttaatatagtgaaatttcgtttttattaaaaatataaaaaattagtcgggtatggtggtatatgtttttagttttagttatttgggaggttgaggtaggagaattttttgaatttgggtggttgaggttgtagtgagtcgagattatgttattgtattttagtttgggtgatagaacgagattttgttttaaaaaaaaagagggagacgatgtaggaaaagaaatagagatggaggtaagaggggtatagggattgagagatgcgtagatatgaatagaagttataagaattagagattaatataaaaagagtgagataaaaagttagatttagtagtaggaaagttgagggggttagtgaaaaagttaagtaaatggtattagagatagataggaaaatagaaattgatattgattaaagggtttagtatagaagtaatacgtgaaataagggataggggagataggggcggattaaagatgtagtaagggggagatagttatttttaaatgttttgaaaggaaatttttttttttttattttattaggttggtttttttagtggttggtttttttgaagttttttatttttttagttttttttttggttttttttagtatttatattttttttttttttagtttttaggtttttttatatgtttttgtttttatttttagttttttgattattgaaggttttttagtttatttttatttagtgttttatagaggaatagtacgtagaggaagatgttggaggtgtttatggttagatataggtttaggaatttgggagaggtgatttgtatttcgagatttcgggatttgtagagttggagtatttgagtaagatagtgaggaattagtaaataaatatatttagggagtgaatttggggggcggaattatgattagatttattagtttgatttagtaggtagcgggggtttttagtttgtttttgtaaggagtttgtttttgtttggagggttttttttgtttttttagtatgttgtttttgtaatttagtttttttttttgtttttgagttgtgtttgtcgtttttttttttatttttttttttttttttttatgttttaagttgttttttggtttttttagtttttttttgtttttgttttttttgttttttttttttagtgtttttatgttttttaaagttatttttttaaatagtttcggcgtggatttgtttgagtgtagaattaataatatttttatttatatatttatatgtatatataaagtttagttgtgtaagggcggattttatttagttttagatttttttgatttttttaagttttaatatttttattttgtaattatttttgttagttttattattttggaggaaagaaataattacgggtggggttggagggtttgttgatgtgtttgtattggggagaaattattagaaaggaaggtatggatgggatttggggtaggggggtggtgatatagtttggaaggttggggttgaagagattgggaaggaggaaggtttatttggggaattagagttagtatgtattaggaggagtaagattaggaatagggagtgaagataggggagatataggtgtttaggagagtagttttttttaaaaatattgattttaggatttttttatattttttaaagttatttaagattttgaagagtttttttttatgaggttatattaatatttattatattaaaaattaaaatagaaaatttaaagtaggtatttattgatttatttaaataataaaaataataaagtattatatgttaataaaatatagttttgtgaaaaataattattatttttttatagtatagtgagaagttgagtattgttttatatttttgtgaatttagtgttaggtttcgtgggagatgtttgggtttttttatttgtttttgtatttagtttgttgggatatgttgttttcgttgaagtttagtatatgaagaaaatttgattttatatagatagttgtaaaaggaggatttttaaggattttgtgaaagggtattagggatttttaggggtttttgttggtttatagattgttgttgaggataaaggagtttgaggattttagaggatgttgagagtatgttgtggggtttttttttgtttttattggggtttttggtgtttgttgggggagatttttttttttttttttatagttttataaagtttaaggtacgggggatataaggtaggtagagtcgggttggggaggggggtgggtaggaggtagaggcggttttgatacgggtagattgcgatgaaattttagtttgttgggattttgtttagttttttgttaggggttgttttgggtaaggaggcggttagttagttttttatataggttttttgttagtcggttttatcgagggtttaggtttagcgtttttttttttttgttaggaaatcgaatgcggtgttataattgtggtggaagttttagtagtttttgtaaagaggtcgtgattatttgtggcgagggtagattttagttaggtttggaatagattaagttatttggaaatcgtgagtttttagttttttttttttttagtagtttttttttgtttttagttttatgttaatttttttggtttttagaattttttaggtttagtttggttttgggtagatggtgtagttgttagaggagagtagtttgtattttttttggtttttggtacggagtttttgagaggtttatagtttttgtgtttttatttttttatttttttatttttttaaaagaattttataggtttattagtttataaatgaagagttttggttttgaaaggttaaagttaaaattaaattttaaattttcggtattagttaaggattagggaggggtgtgtgtgtgtgtgtgtgtgtgtgtgtgtgtgtgtatatgtttttaatattttattttaatataattttggattgatagaaaagttgtagaaatatttaattttttttaatgttaatattttatataattatagtataattattaaaattataaaataattgatataatattattaattaatttatagattttatttgatttagtaagattttatattgtatttagtttttatgtttttttagttttttttgatttgtgttagttttgtttttttttgttttttatgattttgatatatttgaagagttttgataaattattttatatttggagtttaaaaaattatttttagggttagtgtagttattcgtatttgtaattttagtattttaggaggttaaggtgggaggattatttgagtttaagagttgagattagtttgggtaatatagggagattttgtttttataaaaaataaataaataaataaataaatagattaaaaaattagttgggtgtggtggtatatgtttgtagttttagttatttagggggttgaagagggaggatcgtttgagtttgggagattgaagttataatgagttatgattacgttattatattttagtttggggaataaaatgagattttgttttaaaaataataataataataatttttaggttaggtttggtggtatatatttgtaattttagtattttgggaggttaaggttgaagagttatttgaggttaggagtttgatattagtttgggtagtaaagtgagatttttatttttataaaaaatgtttttaaaaaattagttaggtatagtggtatatatttgtaattttagttttttgagaggttgaggtaggaggattatttgagtttaggagtttgaggttatagggaggtatgattgtattattatattttagtttgagtgagagagtaagattttttttttaaaattaaataaaattatttttagattaaataaaaattacgtgtcggatgtagtggtttacgtttgtaattttagtattttgggaggttaaggcgggtggataatttgaggtcgggagtttaagattagtttgattaatgtggagaaatttcgtttttattaaaaatataaaattagtcgggtgtagtggtgttcgtttgtaatattagttattcgggaatttgaggtaggagaattgtttgaatttaagaggtggaggtcgcggtgagtcgagattatattattgtattttagttgggtaataagagtgaaatttcgttttaaaaaaaaaaaaaaaattatagatatttgaaatattaaaaattattttatagaatgtttttcgatatttatttatttgatatttgttatgatgagattgaggttatgtattttaagtaagaatattgtagaagtgatgttgtattttttttgttgtattatattaggagtttataaggttaatgtattaattttgattatttggttttagggaggtgttttttgagggggttgaaaatttttttgggttttttgaaattatatttgttttgttttagaaggtaagttttgaagttaggagtttaatattttagttttatttttttttttagttttagtgattttgatttattaatatttagtttgcgtcgtagtttattattgtaattaagtggagatagagtcggtgggagacgtgatttatttagtttatagggattgttatttgggagatttgtgtaatagcgtcgtggtaagttatgtggtttttgtaggtattttggttgtagtagttatcgttttgatttgttttttgttaggattgtggagcggatagggggagtaggagtagagaagggaataagggagtaagggaataagggatatttgaatatttaatgtgagaagataaatatttttttgtgagttattaaaatttatgaattattttatagttgattggaaaattatatttatttttggttgatgggagggttaaaagcgtaatatggggtatttaggttttagtttgggggttattaagtaatagcgggtttaattatagtggtgtattttttaattaattaaattttaaagggtaatggtttatttgttttttgtggtttttggattttgttgttgggttgaattttttttagtaatgagatttattgagtggggttgttagggttttgtgagtatgagtttgggtttgtttttttattttttatttgtaagttggtttttaataggattattttgaattgagaaaagaaatgtaaaaattgtgataggtaaaaattgtttgatgttttatttattaattaggttaggtgaggtttttgattttaatttgagagaaattgaagaaatagggttttaggttttatttttatgtattttttttattttttttggagagtttttaagttaggtcgtattttttttttggtaatatattaggggtgtggtttaaatttaggatatgagttgttgtgtgttatttggagatattggaagggaggatgaagatttgaaaaatttgtttttttattttttttagtttagttttttagggaatttttttgaaggatttttgtgtaagggagggagattgagagtattattttttgggaggtgatttgatttttaggtttttttataataaatgtatattttattagatttagatatttattatttaaaatggaaagaggtgagtatgggggatggggtatatatgggagtttggatttggggagttagttttgtatagtgaggttattaggtttttgtgggagtttttattggggataatatagaagttttattttaggtttagattttaatttttttttaagtaggggatagtagagtataggaagtaaagtggggagtttttttaggagttaatggaggttttggaaggaagtgggaagggatttagaaaaaggagagtgaagggtgtgaggtgggaaggatggatgaggagattattcggaatagtgtttaattaaagaaatgggagttagggagagacgattttgtaaagttaggggatatagagatatagggagagaggtttaggttaaggtaggtgggaggaggggtagttaatggaatgagttttagtgtagtagttagaggttaaggttagttaaggaggtaaggaagataaggtttagggttggagtgggtcggggttttgcgttgttgtagttgtttttgttgtagtaggtggtgttatatgttagatttagtttacggttggtttggttgaaggttttttgatagggtttttttggtgtgttatagcgtagattggagaaaatttatattttatttaggggtgggaatgggtagggaatcggttaggatgggtatttggtatgtttgtgtttatttttttattttatttatttatttaggttttttttttttttaattttgtttttggttttttttttttttttttttagtttgattttttttttgtatatttttatttattatttttttagttttggttttattatttgttggttatggatttgttattgtttttgttttttgtttttttgttttttttaagatagagttttattttcgtttaggttggagtgtagtggtgttattttagtttattgtaattttcgttttttaggtttaagcgatttttttgttttagtttttcgagtagttgggattataggcgtttattattatgtttggttaatttttgtatatttagtagaaatggggttttattatgttggttaggttggttttgaatttttgattttaagtgatttaattattttggttttttaaagtgttgggattataggtatgagttattatgttcggttgtgttattgtttttttttgaggtcgtttttttagtataataatagtatttatattatagggttgttatgaatattaattgaaaaaaaggtatgtaaagatataggatgttgtttggtatataattatttttggttaaatattattattgttataattttttgtttttttattttagttttagatttatttgggttttagttttggttatagaggtttttatttttttgtttattttattaaggaaggggatgttattaaggtatgtatgtgttgttaggtattgttgttttggttttaggcggtaggattgtcggtttatatagtttagtatagggattttgtagtaggagtgatagcgaatgttagttgggaagatataagttaggttgaggtgatggggtttttgatttatttggggataagttgagttgggggtaggggtggagggtggagaagagtttatttcgtaggtgttttaatttgtttggttgtttggtttagtaagtatagagtaggtgagtgatgtagggaaaatggaaagtgggcggtaggtaagggtagagttgttgttttgtgaaaggtttatgttttatatatttttcgttattttatttcgtttggaggtgagttaagagggatagaattatgaagaaaaatatggggttggagatagatggaatgtgaggaagatattatggggaaagaatgtggatggtgaaggaggagatggaaatttgaaagaaggagaaataataaaaatgaaaattatgagggttataatattgttagaaatgttttggaatttgaggttggcgagaaagttatttgtggttagttttagtaatttataatttattttttattttttggagttggtaagagtgtggtaagaggaattagatttgaatagaatttttttattttagtagttttttagtagaaaggaatgatatttgagagatagattattagattttattttagtattttattaaaatggagagggtggatatagaaggtggtattttaagttttttgttttagttaatttaaggtttgggtaggtaagatttggtgacgtagggttcgagggtggaagagtttggtaagtgtattttagtgaaatttattttattttggaggtaagtggtttagttgttttttttttagaaggtttaagaaaacgttttgtttttatggaggtttttagatgttattgtaattatttagaaagtttgtattttttgtatgggaggaggtatgtaatttaggaggggagtagggggtatttaggaaaggttatggttgagagattgaatatgtgagtttttgatggagtagatggggagggtaggttataaaaggagtttggggttggatgtttaggttttcgagaggatattttattgagtatagtagatagaggagaaggtaggtaagttagattttggagagttgtatattgaagtggggttggttggggaattggatattagagtttttaaggaggagatattttggagtggggaataggggatttagagttttggtaggtgagagaaatgggttttttttggaggtggggaggatggatggagatttggttttttgagaaatagagtaaggaggttgttatagggaagtttggttttggtggtataggagagttgagttagttggggttgggggtgttgggatttcgagtggtgggtagggtcgggaagtgggtagagtagggtgtaaaggttttgattaggtaaattaggtttttggggtttttaggtgtttatttgagatttagtagagtagaatagatagggtgagtagtataagggtttttatggcgagggttttgagaatggtggtaattatagtagttgatagagtagatttttaaggatttagttttaggagttgagtggtttttttggaatttataaatttaaaggttttttttttttttgtttttggtagtttttttttttttatttattacgtagttgattagagaaaagataaggggtgggaaggtattgagtaggattgagtggggagtagggatgggagagagggatgggggaaggtaggtgttattagtggttaatgttattgtggtttttggttttaggttaagatgttttttttggtttttagttaagagttttgttgtttagttttttgaatgagtattattaaaggtttttgtgatttatagtgtttatggtggtagtttttgttggtttttggaaaatggataaaaggatgtggtttaaattaattgttgaatttgggtttttgggtttttgttgggtattgataggggtatgttggtggaaattgggggaggaatgggttaaattaatttttatttagtttttattcggtttttttaatatttgtttagtaataagtgatttattgatggtttttgtgatgttatagtagtagaggtaggggttggggttatttatttaggagagttattataggtttgttaagtagggttgttttaggtttttatgaaggtttttaggatgttattcgtgttttatttgcgtttggtgtggttttgttgttttagtttagtagtagtaattgttttaggtgtggttgtgtgtatttgttttaaagtatttttttagttaaaatttgttaatttgggtagggtattaagttaggaggaatagtatgggtatagagaggtgaggtagaagttaaaataagaatagaaatagtaggtcgggtgtggtggtttatatttgtaattttagtattttgggaggtcgaggtgggtggattataaggttaagagatcgagattattttggttaatatggtgaaattttatttttattgaaaatataaaaattaggtgtggtggtatgtatttgtagttttagttatttaggaggttgagataggagatttatttgaatttaggagtcggaggttgtagtgagtcgagattgtattttagtttggttatagagtaagattttgatttaaaaaaaaaaaaaaaaaaaaagaatagaaatagtaataataatggtaagtatttatatagtgattttatgtattttaagtagtttatatgtattattttatttcgttattataattttttataaaataggagtttttgttgttgttgtttttgagatagggtttggttggttttgtcgtttaggttggagtgtaatggtttgattatagtttattgtaatttcgattttttgagtttaagcgattttttttttttagttttttaagtagttgggattataggcgtatttgaaaagttaagtaggttaaagtatttgtgtaaatggttcgagtatatattttaagtgagaattatttgaagatttcgagtttgtttgcgaggatttttaaagggatttgggtagttggtggtttcgtttttttttttatcggagttttttagttttttcgttttttttacgtttaattttttttcggtttttttttaatcggttttacgtcgttgattcgttcgtagtttttttttattatattttaattatggttgtgtttttgtagttgttatcgttgttgttttcgagggtttaagggaattttgggggtaagcgatttttgggagagttgtgatagacgtagaggggttgaagtaagataagggtcgtttagtagggtgggttgtgtgtgggaagatttaggatggttggagtgtagaatagagaagagaaagaggagacgggatggagggtcgttttgttttgtggacgtgttttaattatagttttcggttttttttagtttttttggacggtcgttttggggatcgggtgaattttttttgcggaggagttttttattttattcgttgggtttgggtatttagtttttcggtttgtaagggtttgtttaaaggacgtcgatcgattttgtgggttttttcgagcgggatttttatcgtgttttttttttagtttttcgtcggtcgtttacgttttttggattttggtattcggcggttggagttttttttgagcgcgggagattcgggtatttttttttgtaagggtcgttacgaggacgagagtcgtatagtgttttacgtgttgggggataggatttattgtaaggttttcgggtttatttatggtaggtgtaggtttgtgcgtataagggtatttaatttcgatatatattcggaggagggaagagggttttggttgggggtttttgagcgggattgttggttgtttttcgttaaatttttgattttagtattttttttcgttacgttttttttttagggttcgtgtatttttagtttttgatttcgttgttgggcgttgggttggtgttcggattgggagttttgggtttggtttggtggttgtataggtgagtaggagggattcggtttcgttaaatggggagtgattagaggtggaaggggtaggattagaattttcgtaaaagaaagagttagatttagagttttggttttggtttggcgaagaatgggagaggttaaaggtgggagcgaggtcgttggttggtgagtagagttttattagagtagatgagttggaagtgtagtagagttagagtttgggttggattgtcggtggggtagagtttaagttgttttcggtttgagtttttaagttgttgggttgtttttggcgtggcgagttttaggagaattagtgagataagattggtggtttttaaagatttatatgttttttataggcgtttgttttcgtaatcgattcgattattttttagatttggtgagattaattttattttatttttttttttttatatgtttattttttattttttaatttttgagtttgagtttttgttgggagtagatacgttggttattttttttttattttttagttttgttttttttatatagttttatttgtgaaaatcgagttttagaggttagtaaaggaggaagagtttaagattttaggggatttggattaggaatcggtaagggtatggggatgggaaggggatagttagaatttttgaggaaaatggattaaaaaaaaaaaggtttgaattttaaggaagattgtggagattattttgtttttttttttttttttttttagagtttgttttatgcggatttggattatttagtttttagtaggtttcgtcggttgtttatagcggattttgttgatgtttttattatttatgtagttgtagtttgaagggaagtttttattttaaattttttaagttaggggattttagttttttataattttttttttttttttggttttttatttggaagaggaaggtattatggtatagaaataagtgttagattgggagttgggagatttgggttttaggttgtttttgttattggttttatttttaaatttatttttattttttttataatttttatgttttttttattattagtgttttttttatatttaattaagttttagttttttttttttttttttttgagacggagtttcgttttgttgtttaggttggagtgtagtgatattattttttttattgtaagtttcgtttgtcgggtttatattatttttttgttttaggtttttgagtagttgggattataggcgttcgttattacgtttagttaattttttgtatttttagtagagacggggttttattgtgttagttaggatggttttgatttgttaatttcgtgatttattcgtttcggttttttaaagtgttaggattataggtgtgagttatcgcgttcggtttgattttttaagttgtttttttttgttgttggtgttttttttttggattttttttttttgttttatatttttatagtattttttattattttaggtttgtttttttttttttttttgggatatttttattaatagttagtttttagtttttttttttgtaaatgatatttagaattttttttggtttagattttagatttgggattaataaatttttatttagatattttgtttgattgattttaggtatttcgtattttgaatgttaaatttaatttattgttatttttgaagttgtttatttaatttttttttgtattttttttaataatttagttgtttaatttagaaattgggagttacgtagatttttttttttttttatttttatataatgagttatgaagtttagtttttttattttaatattattgttaaatttatattgtattttatgtttagcgttgttacgtgaatgtattttgtttattttttttttggattatttatagttttattttatttttttatttttgtttttttttttgaagttagagagattttatttaagagataattgtttttgatagtttttattatagaattgaagtattttttttagttttagttttgtgtttacgtgttttggttttggatataaggtattatagtattttgtttattttttaggtttatttgtgttattttatatgtatattttagaaaatgttagttttagagaattttttttagttttaaaatgtttttgtttagtgtaattttttttttttgtattattttttttttttttttatattatttgtttggttaatttttatttatttttagtttaagtatggttttttttgggaaggtgattttttttggttattttttgtatatattttgatgttttagggtatattttttttattttttttatagaaatagttttttgtaaattgttttatgataatttgtattttaatttgtaagaaatttgtatgtattgtgagttttttaacgttaggagattgatttttttgatattattgttaagttttattaaatgaatgaatgaaaatgaatgtttttggaagtgttatttttttttttttattaaataggggtggattggtaatttattagtttttgaattatttaatatttagataaatttagtgagtaatttatttatatatttttttttttgttttggatatattttttatgatagaaattttgttttgtttattttgtgtttaagtatttatgatatggttgggtaatgagttgataagtatttaataagatttttgaataagaggtttttttttttgtattgattttaaatttaggttttagttttgttttatttttttgttttagtaagatattagttatagtttagtttaaaaggttaattttattttattggttttgagagggaggatttatttagtggatttttttttttatattttttttttttttaatattgaggtttttttttaattattgtttatttagtattttttatttaattttttttttttttttattttttatattattttatttttggttagtagtattttaaggttaggtttttagttgtgggggcgtgtgttgagtattaagtagagggagttgagttcggcgttagttttttttagttttgagtaggatataggtattagggtgatattagagagtttttgtagtgtttgtatagggaagatatggagtggggagaggggagtgagattttaggttgagttaggttatttttttagttagtttagagtggttttatttaggtttttagagaaggtatttttttttttttttattaggaaagtttgaaatttttttttttgatggtgtttggtgttggagtttttgtttttttttattttttggttgttgggtagatttttatttttacggtgtaggaggaaagggggtatattaggtaatttaggacgaagaaagagatagttagtagttgcgttatttgggagggttagggaggtatatgggtgatttgttagtattgttattgtttagaggaaagaggaagtgttcgagttttagaatttttttatagttgtgtttgtttgtttaattattattaagggttggggacggattgatatttgtggaaaataatgatagtaagtatatagagtttacgatatgttagatattaagtattttagttatttttgttaatttttattttggaattatatgtagttatttttaattttttattttttttagttttttttatttgttttatttatttttagagttatagtttaggtgttatttttggggttttttgaaatttcggaagagtaaattaattatttttgtttttagttttgttgttgtaattttttatttttttttgtgtttttttatgtaagatggatagtttattgagggtaggggttagggttaattttttaagttttttagttttcggtttttcgggtttagaattgcgtttattttcgttggtttcgttttttttttattcggatagttttttgggtagcgtcgttgttgtttgttataatagtgcgaggtttttttatgtcgtagagatcgcgtaggtgggagggattcgagattggtatagtggagacggcgaagttttagggagagcgaagggaggtatttaggggcgcgggaggggtgatggggtatttttaaatataggttgttttttgttttttatttttttagcgggcgtttaggttttttcgatttttatttgtattttttttttttttaggttggtttcgtttcgtattcggaacgtgttcgttacgattttagtttttcggtgattggtttatttggagaggtttacgaaaaattttcggtttgagttcgggaggtcgcggaggtttgagggcgggagtgagttagaaataaggttttagacggtcgagttttttaaattttatttttttgtgttaagatttatgtttttttttagttttatcggtgaagagaacgttagtgttatttagcgtcgcgttttcgttttttatttttataattcggagttttaggttttgtagggttttgcggattttatcgattttaggataggagaagagggtacggagttgtgatatttttatttttaatttttttttaaagtttcgatatttagttttttttgtttttttttatattatattcgcgttacggcgtttatttttggtttacgagcggggttttagggtcgcgtgattagggtcgtgtttttttggattacggtcgtgtcgttaagtagcggttttagcggtaatgattttttaggtggtagttttagtagttgtagttttagtcgttgttttagtttattttttagtatttcgtgttttttttgagttttggttagatttagagcgggaaggttagttttcgtattttttttcgacgttaggttttttgggatttttcggattagggtatgggagtagcggtttagtttttttttcggcgtttttattttatttatatagattttttttttaatcgttcggattttttagtttttttgtttttttatttgtttgggagaagaaatagaaaaggaggagatagagaaaaagatatgtagataagggcgttgggggtggttaagagcgtttaggttttttttttgttatttttaggcgttttttttatttcgttttatttattttagatttttcgtttttgtcgattttattttatttagtatttttaggggttagattttttaagaggagtttgaggaataaggttagggtttttaatttttaaaatatttgttgtttttgtttgggggtttgtgaggtttttgtcgggcgttttttttggtagttattaggatgcgtttattttttaaaaatgtagtagtttcgtttttttaatttttagttgttcgttatcgtagggattggaagtttagttcgggattcgtaggggttatgggatagaaggagaaagttggagaggtaggggttggggaatggaagttttgaatattcgaacgagaagggagagaggtgggtaggaagggaggagttcgagtttaaggagttaagtatttttttttcgttttggttggttacgttgtttttagtacgatttagtataaattagatcgagtttcgaaggattgggagaggtttaaaacgaaatgcgaggggcggggtaatagggggcgtggtttcggggcgttggtattattttcggttttaggattcggtttttcgtttatgttttaaagtttatttcgtttagtttcgcgtttaaatatcggttttttatattttttgtttggtgtaggtatgggttcggtatttttaaatttcggtttttatacggtttagggttttttacgtaagatttatttttagcggttatttttatttttgtcgcgttgtgatttcggttggggttttatttttcgaggatagagttggtggagaagggagttttcgtttttaagtttcggggattgggagttttggtttttagcgggggtttttgtgtaggcgagtttatatattacgatggggtaggggcgcgacggtttggcggtttcggggtattgtttaagcgggacggggcggggttttttcgggttacgtttatttcgttttgttaagtcgcgtttattatatttagattgcgttttttttgttagaaatcggtatcgtttagcgagcgttgtttaggtttatttagatttggtcggttttggcgacggggttgtaaacgtttcgtagattttagaatagcgtaacggcggatcggcggatcggtacgaaatatagtagttttattataaatatttttttttttaatttttggtttttgttttgagtttaagattattgatttattttttattttatgtcgtttatattttaaatttttattgcgtaaaaatatttgatttttattttgtattttattattgaaatatgttgttttatttattttattttataataaaaatttgatttaggttttttattttttttttttatttttttttttattatattatttcggaataagtgttttaggattttttgtttattggttattttggagtgtgtttattgggtagtaatgtggaaattattagggtttttgtggagaaaatggagggggttgagggagttttaggaggggtttatttgagggtttttgttatttgtttataggcgagttcgatttttttattatttggataggtggaagcgaatttttttcgggcgtaggtattgtttaagtatcgatgtatttttcggaaggtttcggggatggtgaattttcggtattttttatatattatttgaggatggggagaggagagggattaatatgttagatttagggaagttattttggtttttttttttttttaggtcgatatgataaaattagtttaattttttattgttttgtattgtcgttagtttttttttttatttattgaaattttggtttttaataattagttattttttttgagtttttaaaatttgagatataatttatttataaaattttttttttgaatttttatagtgattttttttttttatattattttaggtattgatataggtgatttttgtttttatattttttattagatttttttttttttgagatggagttttgttgttatttaggttggagtgtaatggcgcgattttggtttattgtaattttcgtttttcgggtttaagtgatttttttgttttagttttttaaatagttgtgattataggtgtttattattatgtgcggttaatttttgtaattttagtagagatggggttttattatgttggttaggttggtttcgaatttttaattttaggtggtttattagttttggtcgtttaaagtgttgggattataggcgtgagttattacgttcggtttatttgattttttattatatatttttaatttttatgtgaatattttattgttttagattttaattttttgagagtaaggtttagttattatatatttgtgtattttttaatgtttagtatatagatgtttattatatagttgtgtggtagattgatgttaggtttatgttgtataaattaaattatagttttgagattatgataaaaatatgggaattagtagttttgattttttataagaggaagtgaagattgaagttataaagaaagttaaagttttgattttaggaaaagtttgttttgtttaatttgggaatttggtagtgatatcgagataggaagagtattttttaaaagtaatattgggatgtatttttttttgttagtttgtttgtatttatgatttatattatggaatataattattttaagtagtggttttgttagtaatgattgttgtaaaggattggggtggggtttgttattggtagtaatttatgaaaattattttaagaaagaaatcgtttttagagtggttgttaggggaagtttatgtgggagttttttaaagggttattttagtggttatttttttttttcgtaataattatatatttgtattatgtgtaattttggtaataggttgtagttagttagggtgagttcgttgttatttaaaaattttttttgagagatatttttatttttagtattggttttatttattttttttgggaggggggatgttaagtaattgtttaaaatttttagggtttttaggagttttttttttagatttgtgtaagagagggaattgattagaattttaggaaaagattgatatagttcgaaaaggttcgttgggggtggatattaatggtgagtttaaaataataatagttaatatttatgtagttatttttttatgtgttattttaagtattttatattttattttatgttagacggagttttgtttcgttgtttaggttggagtgtagtggtatgatttcggtttattgtaatttttgttttttagatttaaatgatttttttgttttagttttttgagtagttgggattataggtgtttgttattataattggttaatttttgtattttttttagtagagattagttatgttggttaggttggtttttaatttttaattttaggtggtgcgttagtttcggttttttaaagtgaatattttatattttataaatttatttatatcgtcgggtgtagtggtttatttttgtaattttagtatttttggaggtcgaggtaggtggattatttgaggtcgggagtttaagattagtttggttaatatggtgaaattttgtttttattaaaaatataaaaattagttgggcgtggtgatgtacgtttgtaattttagttatttaggaggttgaggtaggagaattgtttgaattcggtaggtagaggttgtagtgagttgattgtattattgtattttagtttgggcgatagaacgagattttattttaaaaaaaaagaaaaaaaaaaatttatattaatttatgaaataggtattgttattttaattttgtggatttggaaatggatttatagagaggtgaaatgattgtttaaaattatacggttagttggatttgtatttaggtagtttggatttagagtgatgattgtttttaagtatgattttattttgttagaaaataggttagtagttaattaacgtttttagtggggtagaagaggttagggaataaatgagaaaagtttaaaagttttggttaatgaaaatgtagggaaatatagaggtaaagtaaaaatgggaagttgggggaaatttacgaatatttgttttatttttttgatatttgaacgtttaggtgtttttaatgttttttattcgttgggttttttttattttttttaggatttaggtttttgatttataagatttattgttattgagtgttgggtttgaatttttgatgtaggtagaaaatttggtaaatatgtttagtttagttgtgttggatttagggtttagagttgttagtttggggtatttgaaagttaatgggaaaaatgaggtaagatgtttttttgggaggaattttagttagtttttttgttttagttttattattatttttgttttttatttttgtaaattgtttgttttttagaatttttttgttttatttttttattttttgagtgtttttatatttgggagggtatagtattgtttttagaaattttttaattttgttggtgtttgtgtgtattttagtgttatatagtaggaatgggagttgtttttttgggtatagtttttgtattgtttcggttcgtttggagaaaggattaggaattaggattggaaatgggggttaggaagaattagaaagggggaatggaggacgtgggataagaaagggattttagggggagggtaaaaatgtttatgatagaaggattcgggtgggtgtgtgtttgtatatatgtgtatattaggggtgttttaaggaatataagtaggtttattttttggtgttaacggtggtaatattgaaggtgatttttttgagttatagtattatgaatagtttttgggagaatgggtagtttttaattttggttttattattgttagtttgaaaagtaattttaatttaaggttatgtttgatgtattttatttatttttaggttagtttttgtatttttatttttagattagttgttttttgtttagttatgatatatatattgtttttttattatgggttttttgtttttgggtttgggttaaatttaaggtagattaatgggaaattgttttgtaaaggtaggtttttggttttttagatattgaggataggtgggaggtaggtagagggaggaggttttggagaatttgggaggatttgaattttagagagggaagggtgtggaattttagtgaggttagagttgtaggttagaagtttggatttttgggtttttgaagggagtagagtttgaagataggagaggtgggtggggtttgggagttagagttttggttttttatatttttaatttaaggtgtttttgggtggggagtttagttaaggggttttgggtttcgcgttagagatgtggagggttttatagagaggggttgttttttaattagtaagtggtgattttattggtttaagggatatttttttttaagttgagggtgatttatttttttgttttcggttttttttttgttaaggatgtgggggaagggatagtgaggatgaggtttgggtagttaaggttatttttaatttgttgttagggttttttagtataagttttttgattgtaataattatttttttataggatatagggtcggaatttttgcggtatagttttatttacgagtaaaaatagtttcggaggcgaatgtgagagtgaggtggggattatatttaagggggcggatttaagtaggtttcgatttttttgggtttagggagagggaatggttgttcgagaaatttaagtagaagggagagggagatataggtagagatatataaagatgagagaaataaaaggggggaaggggaaagaaaggcggtaggaaagtggagagtggggagacgtgcgtgttaacggagagatataaacggagcggggagaagaggatattgttaaggaagggagggaggggtatagttaggaggttttaagattgggaaatgaatgtagtagcggtagggaggggagcggtcgttgtaattagaggggggttgggtgatatcgagaagtttgttgtttgtagttttgttatttaaatgttataggattatttttttttatttatattcgtagagagaggagagagttggggtaagttttttatttttttaatttttaaattttaaaatgttttaatcgagtttttttttttcgtttgattttttttttatttatttttgtggtagttacgttaaatttacgtttttttgttatttttttttttgtttttttttttagttttggggatatttaatgttattcgattatttttttagttttgttttttaaatttcgattttagttttttgttttgtttcgtttttttaaagttttttaatttatttgtttttatttttaggttttttttaatatatcgttttttttgaagcgtttttatttatatatatatatatatatatatatatatatatatatatatattttttttattgtattatttatttttagattttgtagggatatatgttttaattgaggtttttttttgttttttttaaattttgttgggtttttattgtttttttattagttcgttttttaattttattttagttttatttttgggaatttttttttttttttatttttttttttttagtttgttagaaatttgtatttttataaattttttagggttgattttagaatttttattatttgttaataagttaatgttttttttttttaaaattattttttaattaaagagtgtacgtgggattgggggtgggagttaaggagggaagggattggggagttaaggttggatcgggggaaaggtgagagttggtttttaggaatttgggtggttgaggagagaagtgtttttatttttacgaataattcgatttgcggttgttttttagttatggttgcgtcggggattaggaagtggtcgtttttgggggaattgggaggggttgggatcggggaaggcgggttttatatttagggatttttttttttagatttagggttgtttttttagtataatataagtttaattagatttatttgtatttaaattaggtttttttattagtttaacgtattttatatttagtttttttagttcggttttttttcgggttggattagagagtcgttgatttatcgatcggtttcgttttgaatttggggaggggattggaggggggcgggattcgacgatgtagggagtgagttcggaaggggaattttcggattttttataggatggggatgggggtgttaaggaggagttttgaaaatttttttgttttttcgattttttttgaatataggatttttttttgttttagtttttttgttttattaatttgagtataattcgattgatttttatataaaaaatttgatattaatagtttgggtatattcgtgaagatttagggatggggattttaaatggaaaggtggtcgtttaattattttgtattttttttagattttaatttaaattttgggttgttgggattgtggtttgagagaagaattcggaagtggaaggttgggattgtagataggaatcgttagttatgtagtttgggattagggaaggggtgacgttagtattttttgagttgtttagattggtgttttagtaggttttgtgtttttcgtagtttattgttttcgggtttagtttagtattaggatttgtagtttttgtggtttatatttgggattgggtataggaaatagagttaggggtcgggtgaggtggtttacgtttgtaattttaatattttaggaggttaaggggggtggattatttgaggttagggagttaagattagattggttaatatggtgaaattttgtttttattaaaaatataaaaatttgttaggcggggtggtgggtatttgtaattttagttatttgggaggttgaggtaggagaattaattgaattcgggaggtgaaggttgtagtgagttgagatggtgttattgtattttagtttgggtaataagagcgaaattttattttaaaaaaaaaaaaaaaaagaagaagaagaaaagaaaaagaaagtagagttagggatgggaagggagatgacgaagttttttgcgaaggaaatataaagtcgaggtaaggggttttgttgtagggaggggtttgtttttgtagtttggttagttttgtgtttttatttatgttttttattggggtttttttttgtgttttttgttttcgttttattgataggttgttttggagatggggtagaggggtgggattattatggttcgattttgaagtatgtgtatagggggtggggtaggggtgttgttagttggttttgttatggggataaagaaagattagatagaatagtgggagtagagtttttggggatatttaaataaataagtagggaggatataggaggagtagttttttttttagtaattttgatttttattaaatttttatgatttgttgaaaaaataaatttagaattttagtttttatattttgaattttttttttgtttaattattttttttttattttttttattattttttgtttaataaaagatttatagttttagaaaattatggtggagtgtaagaatatagaattaaaatagagtttgaaatttaaagaaagggagagatttgggggaggagtggggtggagtgacgtgatgtgttgttggaaattagtagttggtggtttttttttgtgtttttttttttgtgggtttttttttgtttgtgggagggttttttttttttttttcgatagaaaggttatttttggtgttcgtttttttgaattgtaatattttgtaagggtatgattttatgtttttgtgtgggtgtgaatttttttatggtgatttttaaaatttgtatataggatttttttttattgaggggaggggattaaaataattttattttttagggtttttttttgttttaattggtttgtgtttaagagaagttttaggtaaatggggttagtttgaagattaaataggtttggtagtttttttcggtttttttttttttttttatagttttatagttatagttgttttgatattaatattgattttggttggttggtatgattatttatagggtatcgtgttttaatttattaggtgataggtaacgttgtttttttttggaattatttagtagagttagggttgtatttttaaattttgtaatagaggtttttttttattttatttttttgtttttgtattttttttattttagtagtttttttttttttttttgggtttttttttttatttttttttttttttgggtttggtaaattagtttttaatttttttatattttagattggaaggtgggtttttttttgatattttttagagttgttattaattttttttaagtttttatagttttattgtttaatagatttgttaggggtaattattaatttagtttttaattttgtttttttattttttttgttggaggggattttttaattattggttagtatagttaggttattttatttttattattttttttaattttttgggttggggggttggggaggaatttttttattttagggtattaggaataaagttggggaggatggtgtatttaaagggattatatatatatatatatatatttttttttttttttttttataattttattttcgtaatatatatatatatatatatatatatatatatatatatatatatagacgtataaataagttttatggagtagtgattttattatgtttatcgttttgagtttaatttttggtttaaaataggtattaaatagttgtcgaatgtatgaatgatagatatttttttgtttttaggggtgtgtagaagtgcgaaggggtatgggtatgttttagtaggggtgtgagtgttttgattagaattatttttttttgttagaatttgatgtaattcgaatgtttttatttttgtttgaagggtttaaataataaattaggttttgtcgtgttattatgggggtggttatattttgtatttaggaaataggtacggtagggttgagatagaagttttgtttgttttcgtttatttatttgaaatatcgtttatttaggttttattttgtttgttaggtattgttttaagttttgtataaatattaatttagagggtataaatattaatttaagagttgttgtaggaaaaaaaataagcgtttttggttttttaagtttggttttttttttaaaattttcgtaacggttttaaattttttttagggattgggattacggattttggttcgattttttcgcgggttttttattgcgttaattaaattttagaaatagtgagtgttagaggttcggttgttaagtaacggtagagggcgggaagtttgaacgttttggattcgtttcgaaggtaaataggttaattagcgtttagattttttagttacggtagttcgtttttttttttcgttttgtcggatttttaggttggattcgggtttttttaattaatagcggttaggagggcggggcgcgtgcgcgcgtatttcgtttacgcgtcggcgcgttttttttgtaggttcgtggcggtcggttagcggggcgtttttttatttgtagcgatttaggttattgaaaaggcgggaaaacgttgcgatggcggtagttgggggaggaggaagataagcgcgtgaggttggggttttggcgcgtggttggtagaggtagagatataagacgtgtacgattcgttttatagggtttttagattttttttttttaaagggtaattttcgcgtgataggaatgagggtggggcgcgtggagttttttataatttgtattttagttaaatattcgagaatttattttttgtgtttatagttttttacgttttttagttttgtttcgtagttttgtagtagaagtatttagtgttttgtattttgcgcgttattttatttcggttttttttgtgaatcgttgttttcgaatcgtttttattttttgtattcgtagagtttttaagtttatggtttttttaggagcgaatttaaggaggatatcgtagggatcgagatttggggcggtttttttcggtttttttagttcggttttagtgtcgggttttagggaggtcgaggaggaggaagtcgaggaggaggaggagttggtcgaggtttttgaggggagtagaaatttgaatggagagttgatgggaagttagaataaaagagggttgggagtcgggcgcggtggtttatatttgtaattttagtattttgggagattgaggcgggcggattatttgagtttaggagttggagattagtttgggtaatatggcgaaatttcgtttttattaaaaatataaaaattagtcgagcgtggtggtacgtgtttgttattttagttattgggaaggttgaggtaggagaattattgtaattcgggaggcggaggttgtaatgagttgagattgttttattgtattttagtttgggcgatagagtaagatttcgttttaaagaaagaaagaaaaaaaaaatagggttgggaagagttgggtaagttttttattttttgagtggttgttttatatttattaaatgggggtgatgatgtttattttagagatttgagaaaatgattaaattatataagatatggtaaattttatatttatgagtgattttaatagtgatttttttttttttttgttggatagatttatttgtgtgtgttgtggaatttaggatatttgggtattgtttattatgatattagtgattttattatttattttatgttagatgttttagattacgagagttttaagtttttttagagaggtggggatggaattatgaatttttttgttttttgggattgtagatgtgttatatatatatatatatatatatatatatatatatatatatatatattttttttttttagatagagttttgttttgttatttaggtttaagtgtagtggcgtaattttggtttattgtagtttttattttttgggtttaagtaatttttttgatttaatttttcgagtagttgggattataggcgtgtgttattatatttagttagttttttgtgtgtgtttttagtatagatggtgttttattatgttggttagggtggttttaaatttttgattttgtgattcgtttattttggttttttaaagtgttgggattataggtgtgagttattacgtttagttatgttttatttatattaatttattttattgtttagtatattttgtgttgttgtaaggaaatatttgattttgagtaatttgttaaaaaaaaaaaaaagttttatttggtttatggttttggatggttggaaagtttaaaattgggtatttttattggtgagagttttagattgttttaatttatggaagaagggaaggtagggtgtgtagaggttatatggtagagaagaagtaagggggagggagatgttaggttttttttgataattagtttttttaggaattaatagagtgagaattttttatttatatttattaatatattttaggaagggtattaatttgtttatgagcgatttatttttattatttatatattttttgttaggttttattttataatattattatattggggattaaattttaatacgatatttggtagggataaattatatttaaattatagtattgatttaatatattttatagttgttttatagaggtttttttttttgtttttatgaatttattttattatttaataaatatttgtgaggttgttttttggtttgtttggttgtttttttttgagatagtgttttgtttcgttatttaggttggaagtgtagtggtgttattttggtttattgtaattttcgtttttcggatttaagtaatttttttgttttagtttttcgagtagttgggattataagaatttgttattacgtttggttaatttttatatttttagtagaggtagggttttattacgttggttaggtttgttttgagtttttggtttttagtgatttgtttgttttggttttttaaagggtagggattataggtatgagttattgtgtttggttataaatatatatgacgtatttataatgttttaggtgttttagatttagttttgggtaaattagttatgtttgttttttaggggtttatagtttagtgataatatttagaatattttattttttttttattattttattatttttaattatttttttaaattttaatttttatttgtgtttttattgtgtagagtattttttatttttagggaggaaatgtttttgagaaggagaggggtaggaagaggagggttatgggtttttttttagttaaagataaagattttttaatttatttgatttttgttttttttttaagttttggatgagattaatttttagtttgttgttacgagtgttaaataggatgagaatatgattcgatttttgggaaagtttggtaaggatttggtaaaggatagagggaaaatggggaaggattaatatatggaatattttagggggttagaattgggtgagagggagtgttagatagaggtagaaggattgagatgtaaagaatgatagttttttttttttttttttatagttttttaggagtatagagagtttaaaagatttgaaattatatttttgttaagtgtggattttggtatttttttttttttgtttagtttaattttttgtttcggtgttttatttttttttttaattttatttttattattatagattttttttttgttttatgttattttaaatttttgtgttttttatgttttatgatttgtttttttaagattttttttgttttttattttttaataatttgtagtttattgggaagtttttgtttaagttatgtttagggatgagggttttttttgaggagtggtgatattttttggatagggttttattgttggaattttttttattaagttaaagttttttattattaaattaaaaggtattgttttagtgatttttattatgatttataaggtatttttataatttttttaggtttataataagaataggagtgtattattttaattagatattaaggtattagtgttattagttttattaatattattattttgattaaaatttttaattttagatagatgtttattttttttagttatttattttttttaggttgtgtttttagataagtatttttatattatatgtagaataaaaagagaattagattaagagtttgaaaatttggtttttgttttagttttttattaattgtttgtgtgagtttgggtaagttaaataattttttttgtttttattgttttatttttaaaatggggtgaaaaaattgagttataagatcgttttttttgtttgttttttttaaataggtttggagataagtaaataacgttttttttttggaaattatttttttattttagacgttatgattgttattgagaaaatttttttttttttttttattattttttttgattgtttttttatagtgagattggttttgggggataagggttgggaggcggtataagtgttagggttgaattttgggaggtattggtttagttttggaaaatagtaattttttttggtgttttgtagtttttaggagatttaagatttatttcgattttattgttgatttttttttaggttcgagtatttggagggttgttgaagtttttgggtcgaagaagaatcggggttgaattggaagattataatgttagcgtttttattttgggttttaagaaatttatgttgtaggtgatttattttaattttaattaaagtaatgtgggattgggaggtttgaaaagtaaagtgggggtggggtgtggatgtggttgtgatttagtgggttaagtgttttaggatattcgggagaatttaagggttaatgagattttgggaagaagattgggataatatttagagagggggataaaggaagtggagttgtggaacgaatttagattgttttttgtttttttgttttttgtttttaggatttatttggtgaatatagattaagatatttataggtaaagaggtggaggtatgttgttgtttttggggagggagaaggattaagtttaatgttttaataattttaatgaggttttagtttttttaattttggggttattaagatttttttttttgaaggaaagggaaggggggttttgagggaaagagaggaagaaaagtataaagatattagtttttttttttatagggagaaattgaggtaaagaaaagtaagggataaattttatattaagatatgatttcggttgggcgcggtggtttatgtttgtaattttcgcgttttgggaggttaaggcgggtggatcgtttgaggttaggagtttgagatttgattaatatggtaaaatttcgtttttattaaaaatataaaaattagttgggtgtgttgtgcgtttgtaattttagttatttaggaggttgaggtaggattgtttgaatttaggaggtagaggttgtagtgagttgaaattgtattattgtattttagtttgggcgatagagcgagattttattttaaaaaaaaaaaaaaaaaaaagacgtgattttaggaggatattttttgtttttattttatttattagtttttaatttttattttttttaaaagtttaagttattttaaatttttttattttttttcgatagtgttttatagatttttaagagtgagttttattttttagtgtataaagtggttagtggattgaaggaggggtttagtttttttggtaggtgtgttttattttttattttatattataaagatttattagaaaagtaattggttttaaagatgtgttttagtttttttttttattttatttttattgttagatattttttttatgttaatttaaattttttatttatttgtatttttcgttttttaagtttgagtatttttttatattttgtggttgtatagtgttgttgtatattagttattattttattaattttgtgttttttttttgggtttgtatgaatgtttttattagttgggtatttgttagggattttgggagattttgtgtatagagaagagttttgtaattgtataattgtttatttgatttgtatagagtttttattagttgtttttggttttagggtatattagggatattttcgtaaatatttatatagttttatattttagtaagttgtgtttaggttttttttttttttttttgaggtagagtttcgttttgtcgtttaggttggagtgtagtggtgtaatattagtttattgtaagttttgttttttgggtttatattattttgttgttttagttttttgagtagttaggattataggtgtttattacgatgtttggttaatttttgtatttttagtagagaacgggttttattgtgttagttaggatgatttcgattttttgatttcgtgattcgtttatttcggttttttaaagtgttgggattataggcgtgagttatcgcgtttggttagttgtgtttagttttgtgtgtgtgtgtgtgtgtgtgtgtgtgtgtgtgtgtgtgtgtgacgaagtttcgtttttgttttttaggttggagtgtaatggtgcgatttcggtttaatgtaatttttgttttttgggtttaagcgatttttttgttttagttttttgagtaattgggattataggtatttgttattacgtttagttaatttttgtatttttagtagagacggggttttattatgttgtttaggttggttttgaatttttgattttaggggatttattcgttttagttttttaaggtgttgggattataggtatgagcgatcgcgttcggtcgtttagttttttatatatgtgtgttgggtttttgagttttttgtttgtttgtttgttttttagatggaattttgttgtgttatttaggttggagtgtagtggtataatttaggtttattgtaattttcgttttttgggtttaagtgatttttttgttttattttattttagttttttgaatagttggaattataggtttgtattattatgtttagttaatttttttgtatttttagtagagatggtgtttcgttatgttgtttaggttggttttaaatttttgagtttaagtgatttttttgttttggttttttaaagtgttgggattataggtatgagttattttgttcggttagttattgagtttttgtatttttggaggggcgggagggtttttgagttttttgtgttttgtttgtttgtttatttgtttcgttttgttttgagacggagttttgttttgttatttaggttggagtgtagtggcgcgattttcgtttattgtaagttttgtttttcgggtttatgttattttgttttagtttttcgagtagttgggattataggtgtttgttattatgttcggttaattttttgtatttttagtagagattgcgttttattatgttagttaggatggtttcgattttttgattacgtgattcgtttgtttcggttttttagagtgttgggattataggcgtgagttatcgtgtttggttagtttttgagttttaattaggtttgttttgtgtatttttttggttaagtgtttttgtgagtgtttatttttttttttatttttatgtacggtaattttagtttatatttgtggttaggtattagttttggttgtttttgtgtttttttaggttagtttttttaataattagtatttttgatttggatgttttagtttagatatataaatatattttattttttgtttttgttttgtaataagtttattttttgttttattttttataggaatttttaatagatgttattgtaagtggggagagaagttgtttaggtgagtgggttttatatatattatatattaatgtatgaattttatatgtatattatatattaaagtttattaatggtagtatatagatttttatatatattattttatttagtagtagtaaagtaattgttttttattgagtattggttaattgtattttatttttataatagttttgtgtagtagttgatatgtattttattttttgttgttagcgtaggtatatatatatttattgatgatatatagatttgtatatatataagtagtaggaaaaaatataaaatgtaaggtcgggtatagtggtttatatttgtaattttagtattttggggggttaaggtgggtgaattatttgaggttaggagtttgagattagttggttaatatggtaaagttttatttttattaaaatgtaaaaattagttaagcgtgttggtaggtgtttgtaattttagttatttaggagattaaggtaggagaatcgtttgaatttaggaggtggaggttgtagtgagttaagattgtgtattgtattttagtttgggtaatagagtgagatttcgttttaaaaaaaaaaaaaatgttaatgtaatatatggttatgttagtatggttatttttagttatagaaaatatattttatatttttgtgatgatttttaaatttgtgtttttagttttgaatttcgtatgtgaatgttaattgtatattattatttgtagtttttataggtagtttaaatttagagtatttaaattgatgtttattagatttgtttttttttttgtattttttttgttggttaatggtattgttggtagtatatttttttaagttatgaattttggattgatgttagaaataaaaaatttgttattttaaaatagagatttaagtatgttatttttttttttttttttttttttttgtgattgagtttcgtttttgttgtttaggttggagtataatggtacgatttttgtttattgtaatttttatttttcgggtttaagtaatttttttgttttagttttttaagtagttgggattataggcgtttattattatatttggttaatttttgtatttttagtagaggcggggttttattatgttggttaggttggtttcgaatttttggtgattcgtttatttcggttttttaaagtgttgggattataggtatgagttattgcgtttggtcgttattttattttttaaatagtttaagtagaaagaaaataatataaattttaggaggtttttttattatttttaggattaagattagtattttaagtagtataatgatgtttagggtttattacgtttattttagttttaatttttagatttattttttaaagttttttttaagtttttttttattggatttattttatattttagttatttagggttatttgttattatggaaatatgttatgtttgtgtttatgttgttttttttggaaagttttttttttttttttttgagacggagtttttttttgttatttaggttggagtgtagtggcgcggtttttgtttattgtaatttttattttttaggtttaagtaatttttttgttttagttttcggagtagttgggattatagggatttattattatgtttggttaatttttgtatttttagtagagatgggattttattatgttggttacgttggttttgaattgttgatttcgtgatttgtttatttcggttttttaaagtgttgggattataggtataagttattgtgttcggtttggaaagttttttttttgttttgtatttattaaaattttatatttaggttaggcgcggtggtttacgtttgtagttttagtattttgggaggttgaggtgggtggatgatttgaggttaggagtttaagattagtttggttaatttggtgaaattttacgtttatcgaaaatataaaaattagtttagtattatggcgtatgtttttagtattagttatttaggaggttgaggtaggagaattgtttgaattcgggaggtagaggttgaagtgagtttagattgttttattgtattttagtttgggtaatagagtgagattttgttttaaaaaaaaaaaaaagtgtattttttttaaggtgtaatttaattgttattttttggtttttataggtatttgtaaggagttgatgtgtattttttttgtgtttatatagtgtttgtttatgtttttttagttgtattgttatattatgttagaattagtagttagtgaatttgtttgtttttatagttatgaattttatttagtagttatatttgttattttagtgtttgatatatggttttgtatatagtagtatttaatgtgtgaatataacgtaaatgtaaacgtattggtgatattatttttaaatagagtggaaatttttgttagttttaggtgtataattttttttttattttatttttcgttgtaatgtgtgttttgtaggagttaatttaggataatttttgaggttatttttaggtaattagtatttttaggaatcggtagggtaatttaattatttatatattttttagtgttttaggtgtagatttttaattttagttatagatgggagggagagaatttttagtggagaagagagttggatttaaggtcggggaggaatgcgtattttttaaatggaattagatagggtatgagattatataatttgaagaattattatataatttaatgaattaaggataggtgatatatttattaatatttttgtatacgaatttattttaatttattaggaaatatttttaacgtataaaaagatgtaaataataatatagggttagatgtggtggtttacgtttataattttagtatttgggaggttgaggtaggaggattgtttgaggttaggagtttaagaattaaaagttgtataggtattaagaatatgattgaatgttatagtatgttttaaagggtattgttttaggagtttggagatatgattttgagatttagttgtttttattggcggtatgattttgggtaagttgtttattttttaacggttttatttttttagttgttaaatttatagtttggtttaattaaagttttttttagtacgagtagggcgtgagttagagatatttaagtgtttagtgtagcgtatgtgttttttaaagtggggatggttatttatagattggtttatattgttttggtgggagtttttagtgattaaggagtagaggtatttgaaatttatttttgaagttatttggatgtttcgttttatttaaatttggggtgttttaatttaaagtaattggttatagattgtaatgtaagatataaatttttaggatttagtgtgtgtatatgttggtttttatataagatggtatttttagtatttgttttatgtagaaaagaatttgtgggtttataagtttttatagagttttatatttttatggttaataagtatatagggatattcggaattagataaatatagatgagatatttatttttgtatatgaatttattttatttatttatttattttttgagatagagttttattttgttatttattttggagtgtagtggtttggtttattgtaagttttatttttcgggtttatattattttgttttattttttcgagtagttgggattataggtgttcgttaatacgttcggttaattttgttgtgtttttagtagagacggggttttatcgcgttagttaggatggttttgattttttgatttcgtgattcgttttttttggtttgttaaagtgttgggattataggcgtgagttatcgtatttggtttgaatttatttttatttattaggaaatatttttaatatataaaaagatgtaaataattagtcgggcgtggtggtttatgattgtaattttagtattttgggaggtcgaggtaggtggaatattagaggttcggagtttgagattaggttggttaatatggtgaaattttatttttattaaaaatataaaaattagtcgggagtggtggtgtatttttgtaattttagttattttagaggttgagatacgagaatcgtttgaatttgggaggcggaggttgtagtgagttgagatcgtattattgtattttagtttggataatagagtaagattttgttttagaaaaaaaaaaaaagatgtaaataataatattatcgggttaggtgtagtggtttatgtttgtaattttagtattttgggaggttatggtaggaggattgtttgaggttaggagtttgagaatagtttgggtaatatagtaagatttcgtttttataaaaattattaatagtaatataaatggttaggcgtagtagtttatgtttgtaattttagtattttaggaggttgaggtaggtagattatttgaggttacgattttgagattagtttggttaatatagcgaaattttatttttattaaaaatataaaatttagttgggtatggtggtatatatttgtagttttagttgttggggaggttgaggtaggagaattatttaagtttgtgaggtagaggttgtagtgattcgagatttcgttattgtattttagtttgggcgatagagtaagattttattttaaaaataataataataatataaatatttatatatttattagttaatttaagaataagatatgtcgggcgcggtggtttatgtttgtaattttagtattttgggaggtcgaggcgggtggattataaggttaggagtttaagattagtttggttaagatggtgaaatttcgtttttattaaaaatataaaaattagttgagtatagtggcgggtgtttgtaattttagaatttgggaggtggaggttgtagtaagttaagattgtgttattgtattttagtttgggcgatagagtaagattttatataaaaaataaaataaaaaaaaagaataagatattattggtcgggtatggtgatttacgtttgtaattttagtattttgggagtcgaggcgggtagattacgaggttaagagatcgagattattttggttaatatagtgaaattttgattttattaaaaatataataattagttgggtatggtggcgtatatttgtagttttagttattcgggaggttgaggtacgaaaattatttgaattcgggaggtggaggttgtagtgagtcgagatcgtattattgtattttagtttggcgataaagcgagattttgttttaaaaaaaaaaaaaaacgaaagaataagatattgttgttgaagttttttaaatgtttttttttaatttttttttttttgtagtgttgattattattatgaattaaagtttattatttttaatgggatagttatgtttttataggaagaatatgaaaagatgaatgtttgttgttgttatttagagatatttttatagttaaaaagatatataaatttatattgatttatcgttttttatttagttttagagtgagttgtagtgttggtatataaatattttaatatattgttttttttttaaaatattgataagtttcgttatttatatatatggaatgatatacggttttattcgttgaaattgtgatatgtagatataattatgtttatatttagtaatttttagtagatatatgtaaatatatttgaatgggtaggatattgtatttgttattatatttttatagtatatcgtggatatatattgttataatttttagggattgtaagtatattttttggtaaattgagattaagatgatagatgtaatttgtagtatttttatttaaatttttatttttaggttatggtttatacgttcgatttatgatttgggggagtttagttttcgtttggacgttatttagttttttttgttgttttagaatttggatatggtttagatgttgtatcggtttttgggttatattaagaacgtgtttgtgagtttagggtggagggtagggaggtggggaaggaggttgagggttgatattgggtagtgggttttttgaggggtattagagtgagggaagagaaaatagcggttgtaattttgtttgattgtagttgattttgaaacgtatgaagttgttttatattaaggttagcgattggtaggttttttataaggtaaggtttttttttttgaattttaaaagtttaggtaaaggtttttagtttgtattttagattgtttgtattttagatatgttgtttaattttattttatttttttttttttttttttggagatagtttcgttttgtcgtttaggttgaagtgttatggggcgattttggtttattgtaattttcgttttttgggtttaagtaattttgttttagtttttcgagaagttgggattataagcgttcgttattatgtttggtaaatttttgtatttttagtagagataggattttattatgttggttaggttggttttgaatttttgattttaggtgatttatttgttttagttttttaaggtgttgggattataggtgtgaattattaggttcggtttttttttttttttttttaattttgtatttaggaaaatgtaaaaaatatttagaataatataattaatttttatgtatttattatgtagttttaatattttaatttacgttaattttttttttatttttttttttttttttttttagatagagttttgttttgtcgtttaggttggattgtagtggtgcgatttcggtttattgtaatttttgttttttaagtttaagtgatttttttattttagttttttaaatagttgggattataggtgtttattattatattggagtgatttttgtatttttagtagagatgggattttattatgttggttaggttggttttaaatttttggttttaagtgatttgtttatttcggttttttaaagtgttaggattataggtgggagttatcgtgtttagtttagtatgtgttatttatatttttttttattttttttttttggattattttgtgggttttgttgtcgtttgtttgtttttttaaataaggttttgttttgttatttatattagagtagagtggtgtagttatattttattgtagtttttaatttttgggtttaagtaatttttttattttagtttttagagtaattgggattataagtttgagatgttgtatttggtttttttggattattttgaagtaagttttagttattatattattttatttataaatattttagtgtaattttttttttttttttttttttttttttgagatggagttttattttgttattaggttggagtgtagtggtatgatttcggtttattgtaattttcgttttttaggtttaagcgatttttttgttttagttttttatgtagttgggataataggtatatgttattatgtttaagttttttttttgtatttttagtagagatagggttttattatgttggttaggatggttttgattttttgatttcgtgatttattcgtttcggttttttagagtgttgggattataggcgtgagttattttattcggttaatattttagggtaatttttaaaagaaaattattttttaaaaagaataatagtattgttattttattttaaaaattgtattatttggtattattaaatatttgaaattttttttttttgagatagggttttattttgttatttaggtttgagtgtaatggtataattgtagtttattgtagttttaaattgttgggtttaagcgattttttttttttagttttttgagtagtagggattataggtgatggttattatatcgaattaagtttttattttttgtttgtatttatttatttatttatttatttatttatttatttttgagacgggattttgtttttgtagtttaggttggagtgtaatggtgtgatttcggtttatcgtaatttttattttttgggtttaagtgatttttttgttttagttttttaagtagttgggattataggtgcgtgttattacgtttagttaattttgtatttttagtagagatagggtttttttttgttggtcgggttggtttcgaattttcgattttagatgatttgtttgtttcggttttttaaagtgttgggattataggcgtgagttattgtatttgattaattttttattttttgtagagataggattttattatgttgtttaaggtggttttaaatttttgagtttaagtgatttttttgtttgggttttttaaagtgttgagattattggtgtgagttacgatgtttagttagatgatggttttagttttttttaatttatcggttttttttttatttttttttttttgttttttttttttttttttttttttttttttttggtaatttgttgaagaaattagattattatttgttttatagtgttttttattagtttggattttgttgtttgtattttttagatgtttttggtatattttttttttttttatagtttttgtaaattaatatttagttttagaagtatgattaggtttagagtttttttttttttaatattgttttagaagtagaggaatataatgtttgatatgttcgattgtttttttttttttgatgttggtaaatgttttgatgtttaatatttaaatttattatttatttatttatttatttatttagtttgaggtgagtttttttttgtcgttaggttgaagtgtagtggtacgattttggtttattgtaattttcgttttttgagtttaagtgatttttttgttttagttttttgagtagttgggatttataggcgtatattattacgtttagttaatttttgtatttttagtagagacgggattttattatgttggttaggatggttttgattttttgattttaggtgatttattcgttttagttttttaaagtgttggtattataggcgtgaattattatatttagttatttattaattttttagtaattataaagtagtagtatttaaatttttgattttttttttatttattagttagaaatttttgtaaagagaaatttttttttatgtattatttggttgttaagtgatagaaattatatagaaatatagaaaattgtttgatattttttttatttttttttttttgagatagagttttgttttgttattaggttggagtgtagtggtataattttggtttattgtaatttttatttttcgggttgggttttaagtgatttttttgttttagtttttcgagtagttgggattataggcgtgtgttattatgtttggttaatttttgtatttttagtagagatagggttttattatgatggttaggatggttttgattttttgatttcgtgatttattcgtttcggttttttaaagtgttgggattataggtgtgagttattatgtttagtttttttttttttttttaatatggaacgttttttgaatttgtgttattcgtgtttagtggtcgtgttaatttttgtaattttcgaaattttagtatatgtgttgtagaaatgagtattttttatttttatttattagttattaatatggtaaattagttttttaatattttttaagatagttatgagatttttttgttttttgtttgtttgtttgtttgtttgtttgagatggagttttgtattgttgtttaggtaggagtgtagtggcgcgatttcggtttattgtaagttttgtttttcgggttcgcgttatttttttattttagttttttgagtgtttgggattataggcgttcgttattacgtttggttaattttttgtatttttagtagagatagggttttatttttttaattaggatggttttaattttttgatttcgtgatttattcgttttagttttttaaagtgttgggattataggtgtgagttatcgcgttcggttttgatagtcgatgaggtttttttgttattgttttttttgtattattatagatttatggttttttatagttatatttttttttttttcgattttgtataaatttttttgttttagagtttgtataattttttattaaagtatttattattttatttttaaattttttgtatgtatttttgtttttttttttagattgtgagtatatttgggatagggattatatttttttttgtttatttgttttgttttgagatagagtttcgttttgtcggttaggttggagtgtaatggcgtgatttggttataatttttatttttcgggtttaagagatttttttgttttagttttttaagtagttggaattatatgtgtatgttattaagtttagttaattttttgtattttgagtagagatagggttttattatgttggtgaggttgatttcgaatttttgattttaggtgatttatttattttagttttttaaagtgttgggattataggtatgagttattgtgtttggttaggattatattttaattgtttttgtagttttagtgtttggtatagtgttttttattgtttttttttgtttttgagattttttttttttgttattgtgattttttttattggtttttgtttttttgagtttgtttttattattattttaattcgagttggatgtggtttgtttttttttttgtgttttttttatagattgtgtatagtgttttgggtttgagggatgtttgtcgttttttgtcgtagtttatttagttttttcgggatattgtttaagagttttttgatgatttgtattatatcgttagttttattgggaaagtagtgagtagaaggaaaaagggagtgtatttagggaggttagggagagagaatgtagtgtgtaagatggggaaatatggaagatattgaggttaattggataaagaatgggatggtgggaggaggtagtagaattttagggaagtatttggagggtgagagttaaaggaggattgtagggagaattggggtttaaggagagttgaggaataggatagagggtgttaggttttaagaaatagtatttatttttttaggtggattttgagggtagttttgttgaaaatcgttttatagttttttttaatatagattttgaaattgatgagagtgagtgttgggtgtggatgggtttgtgagttttgcgtagtgatggagtattatttttggtaggtggttattatagttggggatttttatagtaattagggtaggagatttatttttgataattacgtgttttttattttcgtagaaaagcgaagattgatgggattttttagtttttttattgaggttgttcgtaaggagttggagaatttggattttcgtatttttttatgtagtgttatttatatttttttggtgagggtaggagagtgggtgtagtttttagatgttttttgggggagatattaggtttatgaaagatatattggtagataagaaaatttgtggggtagtttgaagaatatgaatatttttttgtggggatatagggattttttaagttttttttagggtggggaggtgtttagtaagtttttaagtaggagagtagagtattttttttttattttttttagattggtttttttttttttatttttcgtttgttttttatggtagaggttagtgattttgagattaatggattggattttatggtaagatttttaatttttgtaaggtgagtgatgaggaaaatgagttagtagttgaggaagagcgttattttatagtagtattgtttaatatgggattttttttttgtagttttattttgagttttattagtattgagataaaggaaagagaagttagagttaggggttggaggtggggttagaaagatggggaaggagaggaggattaagagatgtaaagtttatagttttgaatttttgtatttagttttttttagaggagaagttgtattatcgtagtgttcgaattaaggagttggatgtattgttgggggatttgtattgcgagattcggggtgaggaaaagttagaggttatatgtattgtaagatgtttaaaaaaagtagtagttaggggaaggaggggagtgggtaatttggggatgtttttaataggttttttttttttttgttttttgtttcgtttattttgattttatttttttttttgaatgttttgaggttttagattgtatttgtaatttgtttttagatttttttaggggtttttgttttttttttatttttttttggaattgatttttagtttttttttttatttatttttagattaggagacgttgttgatgtattagttatagtgttaggtgttggtacgagtagttgttttaattcgagtattggattttgtttttcgtttggacgttttgttggtttttgttagtgttgttcgggattatggttatttaaggtcgcgttattttttataagtttttggggtacgaatttagaatggtaggtaagaatagaggcgggtggaggaatagatatgaggggtttaaaggttatattttttgggggtttatttattttgatttataagttatgcgaggtgttttttcgtttattgtagatattttttgatggaattttgtgttcgaatttttgtgtttaattttatagaatgtggtggggataaagggagggttaaagttattattggatttaatttattagggaagagtatatattttaaataggtgaggagaagttttgtagtttgggtttttggcgttttttgtatttattttatttttatttgttagttaatttaggtttttgtagttttttttttattttttgatttcgttttttatgaaaggattattatttatatttttgtgtttttattttatatgtttttattttttattggagagttatgttttaatggaatttttcgtggtttaaatttttttatttgtttttgagtaggtatatattatttttaagtatgtttttgtttacgtttcgtgtttttttattgattttaaattagtttatagggttatggttaggattcggggaggagagatagagttagtgtgtttgttatttattttttttgttttattttgtttatttttttttgatgtgttatttatgttttgagttttatttttattttagtttacggtattaggttttaggttttgtttttttttttatttaggtaggtttgattatatttatggttttggtaggtagttttgtgttagtagaggaggtcgaaattggggtagtagacgttatttttatacgaatttatagttgcgaatttattttttttggtttttttatttttatgatcgattttaattaggttaaagggaataaagggaggtgggattgaggaaggggataatgggaaaggaatttttgaaaatgtttataataggaaagtatgttttttgttgtatgttttttatattaaaagtggggagtattaaggttagagataagaagaattaatattataaatattttttgaatttttgttttatgtgagttattgttggtaaagaggatgaataaagcgtgtattttattatttaagaatttgtagtgtagtagggagggtatgtatatagttttatttataggttaattgtggttagtgcgttacgggtttttaatattaatttttttttgtttattttatatttagtaggtggcgaaagtagtgaataatgttattgtatagtcgttggtttttattgatgaatttggaaagggaattaatacggtgaggggagaaattgatgaggggagaaattaaggaggggaaaatggaggaggatgaaggagtatgatagtgaggttgggtttttggaatggaatagggttgtgtgggtagaaaagaaatagaatacgagatagggaaaggtagtgtaagtgtagaggggtatatggggtttttatggtttcgaatgttaatttttgttttttttgtaggtggatgggttcgcgtttttggtcgttgtgtttcgatattggttggtacgtggatttatatgtttttatatttttgtggttattaattttttgagttttgtttagttatagttgttgttataagggtttttggtgtagtatttggtgaggagattaatttagtttttcggggatttttaggttgggtattttttagaggtggggattggtttttttattagaataagggtttttttagtatagagattatatttttttttttttttttttttttataggattggttaagggttttaggataggaaggaggtgattgatgatatattgttttttatttttttttaagattatggagatttgtgaggatggtaacgattttgtttttttttattaggtttgcgaaggtgttgcgaaggttagttatgttttttatatagttgtttaggttgggttttttgataagtttgtggttcgtggtaaggaggtgatgagatttaaatgtgtaattatttttatattagagtttttttttatttttagttttattgggtttgggtttaggtttataggatttttgatttttattttttttttttttttttattttttttattttttttatttttttgtttgtttttaggttttagatttgattcgtagtggaaaatttattaagtttgttaaggatttgttaaagaagaattaaatggaaaagtgcgtatatggttttagtgtttttattttttttgtatttttttttgtaattttttttttttttttagggatttagtttttttttagtattttgttttttagaaatttattatttttttttgaaatttttaaatttttaagattttaggttttttgtgttatagttttttttttttgtttagggatttggttgtttattttgttataaattttgcgatttttttttttttttagttgttagatattagtggataagtttatgaaattggatttggaagattttaatttggatttgaacgtttttatgagttaggaagtgttgtttgttgttattagtattttttgagagtttttttagtgttttttttagttttttgagatttcggtgggttgttatgttttttttgtttttttattttttttagacgtagagtttttagtttttttagaaattttgttttatattaggaataaagtttattttgaagaaagatattgtttttttagttttaaaataagagattaggaaagatttaaaatatagagtaggagtttataggggaatttgttttgttttagtaaaaatatagtgttgttgttgtaggaagattttcggattttattttaggatattttatgagaacgaatttttttagagaggttttataaaatagattagagggaagatagaggggtttaagggagatggtttttttttttaagtaggaatattttagttttagatagatatagtaggaaggggtttgagaggttgatagaggtaggatgggtgtaaggtaggggtggaggggagggattagttcgggttgtattagtgggagtggttttattttttttattttagagttatggggagttagggttttggcggggtgtttttggtgtaggttttttatatagttttgttgttgtcgttggggataagtcgttaagatttaggggtttagagtttttttttttgggtgagtattagtttaataagaggttttaggggaatttttttaatagatttgttttttatatttttattgaatttgagggtttatagtgttttcgtttgtttttttttgttttttaggtttttagtggttagtttgggtttatatttagtgattatatagtgaatttaattaggggtggagagaaagggttataatttagagttttattgtggcgtgagagttagtttttgtgattgttttttttagttacgtaggatgtaggttttggagagagaataggatgttttgtggtagggtttggagttgttatagtatggttaggtttggtttgaagattatttgagggaggtatagcgatagtagttgtatttaggggtttttggtgaggtatgggggttgtttttttgtgtgaatggggggaggattagggagggaggaatagggaatgtgtagatatagtttgagattattttggagaggggagagttaatggttagggattatgagttggaggtagtatcgtaatgataggatgttattaagtgttaagttggtgtttattgttggggttggaggaagttggtttgtattttatttagagggatttggattattttatggagatgagggtgtggtttggattattttaatggggtagggatggatagggaggttttatgaagagtagtgaaagggggtattgtgttatttgagggagatggaggaattgatgtgttaaagagatggaggtggagagtattggatttttttatttgtttgggagggtattgggacgaggggatttagatgagagggatggtttgtggtgataggaatagagtggtagacgattttaggtttttattatgttgttagtttttaattttttttttagaattttttaatagatttatatttagagtttggtcgtttttcgttagtttagatttaaaaggtgaatatttgtttgtagaatttgatttatgagaaggtgagtttattgtttttagtttagatttttgggaagttggattagagaggggagttgttggggttagtgttggtttaatagaaaatatagcgaattttttttttagttttttttaagtttattgaataaggttagtttttgtattatttaggatttaaaggaaagacgaagggagtagaatttgtggtagtaataggtaaattttaagaaggagggtaggagttttattttatagggttgggaggagtttagaggttttatttgttttttttttaggagttgttaaggtagtagaaaggagttatttagttaaaggaggagatggtttagcggggttgtattaaggggttaagaggttttattcgtgtttaaattttttttttatttttttaagtttggtgaaagagttagaagttttaggtttttttttttgttttttaatttaatagttaaaaaatggttttaggtagtgagttaatgaagtttagatatgttggtgtaaagttttttttttgtttttgaaaattttatttttttggtgttttatgtttttatttttttttatatgatatgtaaaaacgatttttttttgaaatttttttgggaagaagatatgtttattgaaattgttttttagttttaaatataaaaataaaattgaaattgttttagaaagtagttttttttaaaaatgtttttggtttgttttttatagggttaggaaaagtgtattgtgggaatatttattgttttttattttagttttgtagggtgttttgttttgttttgtttttgagatagggttttattgtcgtttaggttgtagtgtagtggttcgattataatttattgtagttttaattttttgggtttaagtgatttttttgttttagttttttagagtgttgggattataggcgtgagtattgtatttagttttagtttcgaagtttttaagaaaggaaagggatgtgatggagaaagaaaatttttattggttgggtacggtggtttacgtttgtaattttagtattttgggaggtcgaggtaggtagattatttgaggttaggagtttgagattagtttggttaatatagtgaaattttgtttttattaaaaatataaaaaattagtcgggcgtggtggcgggtatttgtgattttagttatttgggaggttgaggtaggagaatcgtttgaatttaggaggtagaggttgtagcgagtcgagattgcgtcgttgtattttagtttgggtaatgagtaaaattatattttaaaaaaaaaataataataataaaaaagagaaaatttttattttagttaggagaggtaaggttttaagatttatgtgataaatgtgttttaggtttttttattaatggggtaggttgaaaatagtgttggagatttatttttttagagttcgttgtgttattaggaggttaggtttagtagaagtagtatttttttaattgtgttttattaggggttgttcgtagttagttttgttttagttttgttttgagttattaatgtgaagggggaaaaggtaggggtggtcgtggtgaggatcgggttagatgagtcggtaggggtggtgtgtcggttttgtggggaaaaggaagagaatgatagggtgtgttagagttgtatttaaattaaatttatattatttttttcggttttgtttattttgtgatggaaagtagtagttttttatttgcggggttggggtcgatattaggagtcggaggaaagtatgagtcgggggtattgggttggtttttcgtttttttgtagttatagttattattattacggaattcggggtcgttgaatttgggatttttagttataggcggttttaggtcgatttatttagttttaggtgagttttggagagaggatataggcgtcgttaaagttttaggttgtttagagtttagagtcgggacgtttgtaggggtacgggagcggagaggaggattttgagggttagtcggagggggataggggtagggtttgggataagtattggtcgggtaagatgttagagggagttggagggtttatgagttttatttggagaggttggaggtgagggagaagttggggttgacgaaagttttaaggttaagattttgagggttcgagaagttggcgatgcggagattgagcgggattttgttgttcggggttaagaaattcgaggggttattaagttgtagagaagggttttttagggaaggggtcgttttaattttttttagttttagtcgtatttttttttggcgttttatttttagaaggatagggattatagtgttaggttgaggggtagttttgtgtaggcgtcgtttcgttgcgttttggttaattagttttagggagaagggtttaggggtggatagtagcgtgggcgatagcgaggttgcgaggagatttcgtttcggaggttttacgggttttaagggtatttggtttagttcggtattttttgggatttttcgaaggatgacgtgggagaaatgcggttgaggatttttaggattggttttggaatttaattttgttatttttattagtagttgggtttgaagatttgggataggggcgaggaggggagaatattgtgagattcggagatatagggagaaaagaattaatggtttttaaaataggggttttttttggggagtatggatgggaaaataggttattttcgaggggtattgatggggagtattaggagggagttttggggtgttggaaatgttttatattttgaattgggtgtattatatgaaatttattaaattgtatattttagtgtatattatgtaaattataatttaatataaaagttatgtatatgtatagatgtatgtatatatatatatattatatatataatatatatattatatattatatattttatatatatataaaaaattgggggttaggtgggtgggggtttagggaataaatgtatttgtaattggttgagttagggggtagaggttagggtggggtttattttttatggggattttaaagtggaagaggaagtttagggaggtttgggttgggaaagggtaaaggtagttagagttttttttgaaaggaatgtgattgatcgtgttttttgaggtttgtagtttttgttttttttttttaggaatatttttttttttattttgtatttttattttaggggtgtttttagttgtgatttggattttttaggtttttgtttgtggagggttatttatggttattatttagaattgtttaaagcggcgagtgtgatttagaggattttcgttttttttttggttttgggagatttttggggttagggaagagattgttatatgaagtatttgttttttttgagtatattttttcgattgtttatttttcggtttttttttttttttttatttttagaggtatttgtagggtttttgatttagaagttgttgatgttttcgtggattcggattgtgattttttggagtagtttatttacgttgaatataagtggttgtttaggtattataataggagggtttaggggaagagttattttgagggattggtaggattagaaaatggggaagaagatgaggtatgggatgaggaataaagaagaaaggggagatagaaagaaattacgttattgggttgggcgtagttggttacgtttgtaattttagtattttgggaggttgaggcgggtggattataaggttaagagttcgagattagtttggttaatatagtgaaattatatttttattaaaaaaaaaaaaatataaaaaattagttaggtgtggtggtgggtttttgtaattttagttatttgggaggttggagtaggagaatcgtttgaatttaataggtagaggttgtagtgagttaagattgtattattgtattttagtttgggcgatagtgtaagattttgttttaaaaaaaaaaaaaaaaaaaaaaagaaagaaaaagaaaaaagaaagaaattacgttaaataggtagaaagggatattagtaagagaggggtacggggttagggatgaagttattatggttagagataaagttggaggtaagggatttaggatgagataattatattttgtgttttattaaaagatgataggttaggcgtggtggtttatgtttgtaattttagtatttgggagattaaggtaggaggattatttgaggttaggggtttaagaatagtttagttaatatagtaagattttgtttttgtaaaatataagttatttttttaaaaagatggtaggattttttgtggtaattttggaggtagaatattggaagttaagtggggagaggtttattgatataaaaggataatgtaggttaggcgtggtggttcgcgtttgtaattttagtattgtgggaggttaaggtaggcggattatttgcggttaggagtacgaaattagtttggttaaaaaaacggtgaaatttcggttttattaaaaaaatataaaaattagttaggtttggtggtgggtattggtaattttagcgatttgggaggttgaggtaggagaattttttgaattcgggaggtggaggttgtaatgagttaagattgtgttattgtattttaatttgggtgattataagattttattttaaaaaaaaaaaaagaagtggttagttatggatttaagaggaagagaaatttttttttttgtttcgtgattggaagaataatatagtagtgagagtgattttttttttttttataagaagagaggtgtagtttgattattttttagtttttaagtgagggttttggtttttatttattagggtagttatgttttttttaataatggttgttacgtttcgaatgtgttggtttttggtgaagattatttttttttttgaggttagggttattgttttgtatggtttaaaacgtagaggggataagattttacgtcgagttcgattttgaatttttgatgtatttttagttattaggaatgttatttgtatttagaagagagtttagtgattggggtgtttaagtgttatttattattatgaatgagaatttttgtgtttaagttttttttagagttgatggtttgtgataaggtttttgtttgttttttggttgttggggtggggaattttaatgatagaattttttgtttttagttagtagttggttatttttttgtaattgttatagtggatttttggcgattagagttttagttttttatattgtttattaggtagggttaaataaaaatttagcgttattaagggtagggttttttacgtatattattaaaggtattaggaaatgttttatttattgtttgttttttttattatatattaaggtttgttgggttattatagtgtggtgtaattttcgttatgagattgttattatagggttttttatatttttgggaggttaatattgggttttttattagttttgtttattcggtagcgtcgtttttgagttagggattttatttggttggtgagaaaggtatttttgggggaggtattcgtgaagataaagatatttgagagtggaggtgtgtgtagtagggttagttggtagggaaggtaacgattagtgttaataatggtagtaggaggggaatgggtagagttacggaggatgaagtagaagggaatatggttcgggaattttatagtgaagttagtggatttaggtgttgaaggtggtggggagttttaggagggatttagttttttttggtggtggggttaggaaacggggaagaagggaggggttagatttgtagggttgataggtatattttaggttcgtttttattttttaaggtatggattttattaagttgttgttagaagttgttagggttattggttgtaaagatagggtcgaattttgggaaggggaaaggaggttaagataagtgaggaaagagttttttttatttttatttagagttatttttttagttgaggggtttggtgtgtttttggagtcgataggtattgaaataataatattttattataagatttatatttggtcgggtgcggtggtttatatttgtaattttagtattttgggaggttaaggtgggtggattatgaggttaagagattaaaattattttggttaatatggtgaaatttcgtttttattaaaaaatataaaaattagttgggtatggtgatgtatgttcgtagtttttttagtagtttttttagaggttttttagtagtttttttagttattggggaggttgaggtaggagaattatttgaattcgggaggtagaggttgtagtgagtcgagatcgtgtcgttgtattttagtttggcgatagattttattttaaaaaaaaaaaaaaaaagttatatttgttagtgtagggcggggtagggcggggtagggtagggtagatttaggtgtttttggtgggaaggtggtttttattttttgaaaaaaatggtggtattttttgtaggtttttattggttatatgtgcgtatataaaaaaaaaaatggttatatttattattttagtattttgagaggttgaagtgggaggattatttgagtttaggagttcgagattagtttgggtaatatagtgagattttatttttataaaaaaatataaaaattagttagatatggtggtgtttatttgtagttttagttatttaggaggttgtggtaggaggattgtttgaatcgaggttgtagtgaggtatgattgtattattgtattttaatttgggtgatagagtgagatttttttttttttttttttaaaaaaaaaaaaaaaaaaagaaaagaaaaaaaaaaattgggtttttttataagaaaagagatcgaatagtatttattttagaggtttattgggaggattaaatgagttgattttgtaaattttaagatagtgttttgatatataagtgttaagtttttagttatatttttatttatatttttattaaatataataagtttattaaatgttagttattgtaggatgtatgtaggtaaataagatttaaatttaggtaatttttagtttagtaggtattttatttgattattattttaattttgggagttaggtaggatgagggaggtgttaggtttttgagtttaagttaattaattatattttttgtgattggtatttatatatttagatggtttgaagtaattgaagatttataaaagaagtgaaaatagttttaattgatgatattttaatattttgttttattttgatgtgataattgatatttattttatagatgatgaaatcgaggtaaagaaagtttatatgattagtttaaagatatatagttagatttaagttagagagtttaatttttaattaatggaaaaggaatataatgtagttagttattttagatgttttttagaagtttggttttaataattttattttgatattaatttttgtttataggaaatggagagaattgaaaatggcggtcgggtacggtggtttatatttgtaattttagtattttgggaggtcgaggcgggcggattacgaggttaggagatggagattattttggttaatacggtgaaatttcgtttttattaaaaatataaaaattagtcgggcgtggtggcgggcgtttgtagttttagttatttaggaggttgagataggagaatggcgtgaattcgggagacggagtttgtagtgagtcgagatcgcgttatggtattttagtttgggcgatagagcgagatttcgttttaaaaaaaaaaaaaaaaaaaaaaaaagaaaatggtttattagtatgaaagtttaagaaagtagaggttacgtgttaaagtatgaattatgtattaaatttatggaaagtgttgttattttagaaagagtgggaggtaagtttgttagttatttttttttttttttttagagatagggttttattgcgttatttaggtcgttttggagtgtagtagtgttattacggtttattgtagttttagttttttgggtttaagtgatttttttgttttagttttttaagtagttgggattataggtatgtgttattatatttatatataatttttattaatttttttgtagagatttgtgtttttttgtgttgtttaggttggttttgaaattttgggtttaaacgatttatttatttttgttttttaaagtgttgggattataggtgtgagttattttatttaggttgttgttaattttttgtatgtatatagtagaggtttattcgggattataggaagtgttatttcgagtttatttttttattataggtttttattttttatttttttatttttttttttttttttttttttttttttttttttttttttttttttttttttttttgtgatagagttttttgtttttgttgtttaggttggagtgtaaaggtacgatttcggggtttattataatttttgttttttgggtttaagcgatttttttgttttagtttttcgagtagttgggattataggtgtttattattacgttcggttaattttgtatttttagtagagacggggtttttttatattagttaggttggttttaaattttcgattttaggtgatttatttgttttagttttttaaagtgttgggattataggcgtgagttattacgtttagtttattttttattttgaattttttttttttttattgttttagttagattatatttatttgggttatgaaaaggtattaggatatagtggataggttttatggggttgttttttcgttgttttataaggtggcgagtttggattttggtagcgttgatttttttatttatgttgttcgtggtgtttaggataaagtttaggttggaggttggggtgatgtttagtagtttggggagtaagttagagatatagtgaagggtttgtacgtttgtttttagcgtttggttttttttttttcgtaggagcgtttttttatgaaggggtttatttttaggaggttatttatttggagaaatttttgttttttaggcggtttcgtagaaggttgaaggtttggatggaggttagaagggttagttttgtagtttggaggtgtagtatgtggtgaggggagaagtttggggatgtgttgtttttgttgatgttttttttcggtggttgggagttgtttcggttaaaatggttttcgtggttatatttttttgggttggggaaagggatttggagagtggaggttaaaaatttattgttttttaagaaaatgaggtttttttaggtttggtttgatttttttattttttagtaagggtttagtaagaaatgatgacggggttggcgcggtggtttacgtttggaattttagcgttttgggaggtcgaggtcggtagattatttgagattaggagtttaagattagtttggttaatatggtgaagttttgtttttattaaaattataaaaattagttaggtgtggtggcgcgtgtttgtaattttagttatttaggaggttgaggaaggaaaatagtttgattttaagaggcggaggttgtagtgaatcgagattacgttattgtattttagtttgggtggtagagtaagattcggttttaaaaaataaataaataaataaatgatggttgggtacggtggtttatattagtaattttagtattttgggaggttgaggtgggtggattatttgaagttaggagtttgagataagtttggttaatatgatgaaattttgtttttattaaaagtataaaattagtcgggcgtggtggtatatgttcgtaattttagttattcgggaggttgaggtaggagaatcgtttgaatttgggaggcggaggttgtagtgagtcgagatcgtgttattgtattttagtttgggtaaaaagaataaaattttattttaaaaaaaaaaaaaaaaaaaaaaaggataaaaaggatggtgttttgtggaggggaattttggagtaaattttagggcgtggtggttagttattatagtatatggtggattttttgatttttttagttagttttttaaagttgtttatgataagggagaaattttattagcggaggaagaagttgtttttttattttaattttattatagtttttttaggggatttttttttatttattttgtttttagtattttttttttttaggaggagatgttatagtaaaggtatacgggtttataggatagagattttgtaagggaatgattttttttttttatttttggggaatttttttgtttggtatttggaggtttcgggggatgagttttaaagtagttagaggtgaggagtgtgaagtttagttaatttttggggtagtttaatttttcgtaatcggagtaggtaggatcggttattgggaagagagggtagggttagaatttaagattttgttatttttagtttttatttttatttatttaaatttttttagtttttttttttagttgggatgaggcgaatatttagaagttttttagtaaagttttttgaattaaaatttaggattatgggttcgtagtgagtttgaatgtttgaaattggggttgtgttggaaaatatagtataggttgggtgcggtggtttacgattgtaattttagtattttaggaggttaaggcgggtagagtagtttgcgttatatagtgagattttatttttaaaaaataaatatataaataaataataagaaaaaaataaatatagtacgtgtagggattaattttatggggattatgttttttgtgagttgtggataggaggtagtttttaggtgagagggtgagggggttgtgagagaaggttttatgggagttagtgcggggaggaagttatatttaagacgggattgaggtttggagatttggttttagttatttttttttgtgtgattttggggaagttgtttaattgagttaggcgttgtttggattgggggattttagtttttgtggagattaagtaatattatattttttgggattttagaatgtgatatagtggttgggtggattgaggtggttttgtggatttttgttttattattagggttatagttatattttgtgttaggttttggagtttttgttttggttagaggaggtgagggtgtggttgttgttcgtttagttttatttagttgttatgattgtagaaattttggttcggaggataggagaaggggagtgaggtattagtttggttttttttattatttttagtattaatatgttatttttttgagttttttatttcgaaagtttttttttatttttattgtttttattagatattttaagttttttttattgttttttttttattgtttagagtagagttttgtttaggtggaaattgttttagtatttttttttagtttagagtttaatttaaggtttttttcggtttgtagagttttgttgcgtgtgttgtttttttagttttttgatttcgtagttttttttttttatttttatttttttttagttatagcgttttttttgttgtttttataggaagtattgttagtttggaggtggggaattgggatatagtttcggggtatcgcgtgttagtgtttattttttttagagtggaggagatatgattaagaaggtattataggacgcgttttatttcggataggtacggaagtgaagatttttttgattattaatttaattttgtttttatttgtagggtatgaagtgtagtttcgaggcgttggcgagttagggtgtggttaagggttttggttgttattacggtttttcgtagagtttttattaggcgcgcgcgtttttgatttagtcgtttagtattaaagtgtaggtcggggttatttttggaagttggtaggaagttttgggttgtattggtacgagatattttatttaaggttgttcggaatcgtcgagaagaattaggtttaaagtaggcggtaaagaggttattagtaaggagtgttcgattttggggagaatagcgggcgacggggttttagggaggttttttggattgattgttgtttattttattttagtaattgatatttaaggttgggtatgagggttttgagttttataaaggagggatagtttcggatttttttaaggagggggatttttaattttaggattaagattattgggtattattgttgtaggggtggggttatgggtgtttttttttttggtaattagagtttttaaggagtagaggttttatggaattggggattttggtaggggtgtgataggattttgggatgtttattaggaagtttttaagacgaagaggggggcggtttgggggtggttgttttaggaagagttgtagggtgacgttgagcgttgtttttttagttaggttttggtgggtgatggagttaggggtagttagtaggttttagatgttggggaagaaggtagatgtggggggtagtaatagttgtagtagaagtaacgttgaggggttcgggtgggattgggggattttcgtggggagtatggttgagatatggatttgggagatagaaggtttttaagggaggaggaagtagtcgcgattttagggtaggtcggttttgcgggtttttatgggaatttgttttattttaaaagtcgtgtttgttttagtttggtttttttattttttcgttgttatttagataatttgagggttttatcggattattagggatatatatatttgttaggagaggggtttaaggttttttttttacgtttttttttttagtttttggttgcgtttttagttttgtcgtagaaatattttttatgtttaggaagtttgagtttttttaggtttttttttatttggttgttgggttttttgggtagggttggttcgggtttgacgttatagggtatttaggttagagttataattaatcgaggtttagtagagggggaggaaggttttaatagggtgggggaggataggtaatttttggttttttcgtttttgtttgtttaaagttataggtagtagtttacgttagggcgggttttttttggttgtagtgcggaggtgagtgagagttggggaggaggaagggagtaagtagcgtgatttaggtttggtatagtgttagggatagatttagatagacgtatttttttgttttttagaattagggttttatttttattttgtagtttttaaggatttaggtatttagtttttttgtttttttttttgtttttattatagatgataagaggattttgtgggaaaatattttattgttgttatttttatggtgagtcgttgggggtgaggggtgaagttgggtggtggattatagtattttttggaatagggcgatggttttatttatttttttgagttttgtttttgtttgttggagttggagtggaattagggggtgggtgaggatttaggtttaagtgaagagatttttaaatatttaggataataaagttgggaagatgagcgaggattatgggaggttagtagtttagaggaggcgtgaatttggttggtttggttttttatttatttttattagtatttttatttttattattattttttgggttttgtttttttttattaagtggtgagtttttaagaataaaggaattttagagtttacgtgttttttatttagtgtttttatttaagtaggagagtatagttttttaggtcggttattttatttgttagatgatgatgatgatattgttttttttttagggtttttgggagaattaagtgagattaattacgtttatttaaggttttttagtttttggtttttatgattggttttttttgtgtttgtgtagtttattttattgtttttttttggcggaatttaggaggtaggggataaataagattggttttttagggttagtttagtaggtttgaaagtaagtggtgggaggtttagggtttttcgattatatgtggattttaagtttagttttaggtatgtaggtttttatattttgggtagttgggtggggtacgaagggtttggttgggagataggatgtttggttttaggttagttttcgttttttatttgttgtgtgattttgggttgtgtttagtttttagttgttttttatgtgtaaggggagggttttttatggtttttgtttaaagcgtttgggttttatgttttttagtggattttttagggttgggtatagagtttagtttttagattaggattggtttttgttttgttttgttttttttttagatagggttttttttttgttgtttaggtttaagtgtagtggtatgatttcggtttattgtagttttgattttttaggtttaagtaattcgtttattttagtttttcgagtagttgggattttaagtgtgtgttattatggttagttaatttttgtatttttgttgtagagatgggattttattatgttggttggttttaaatttttgggtttaagtgatttatttattttggttttttaaatttttgggattataggtgtgagttattgagttaggttgttttgttttttaaggttagtgggagtggagaaggaataaagaaatttgtaattggttacgattaattagttgttaatattattgtattcggattagtttagattagggttttgatggaggaaggggatggtgtgggaaatgtttatttaggttatatattttggttttatttgttttttggatttcgagcggtattttgataggatagttcgaggtagtacggcgttttcgtagacgttgggtttgtcgttgggttttaattcgtttggtttgtagtttgtttagttttcgtgtagggtttattagtttttgaagttgtaggtggatggagtagcgattagaagttagagttatagcgtaattttggggggcgggagtttttagggttagaatagttattatatttgcgttggttagggtttgtacgtagttcgatatcgtcgatgttagggcgttcgtggttttattcgttatttttaggaaatttgttagggagggagaaaggtgaggtttagttttatggagataggaaattaagtagttattgtcggatattgggttttagagtaggttgaggggatagtgggatggggcggatatgggggtttgaggtttatagttaggtcggattcgggtgaggttgtagtcggttcgtagggagcgtacggttcgcgtgatgtttagcgttagtttaagggcggtttttgtttcggggtttttttaggagtattgtggggtggaggagggggtgagggggtttggagggtaggttagatttttttttttaggttatgttatatttttgagggtttcgggtagggggtaatatagaggttagggggagtttgcggtatttttcggggtagtttttggaatagttttttcgttacgaagggtatgaagggtgagagtagtcgtaggttaacgtttaggtaagtgtatagggtttggcgggtatatttagttgttatttggtttattttatttagtataggttttaggtatttttaggggacgagaggtatagggtttacggttggaggtttagttttgagttttcgttgtgtttgtgaggattgggaaggggatgggttggtttaggttttaaggttaattttggtaaaattgagtttagggttttgttgtttatttgtttttattattttttgtttcgttgtgtttttttttattaagtagatattatagagtttatagagttagaagttgtattgggtagtggtgacggtcgggaagtcgtaggtttggaagttttgattgttgagttttatagtttttgttaggcggttgcggatttagcggtttattaggtttttatggttttcgggtttggggagagagggtgtattagtcggcgggttaggggagggtgttagaattttatgggggtaggagttatgggtaaatttttatttagagtttgatgagtttaaagtaattatttatgtgttaggatttgggaagaagtgataggttttagtttttaatgcgttgggttttttttttaattgtttgtttttgtgtttatttgtttttttagttatatggaggttgtttcggataggggtatagtttgtgtgagtgttgttagttttgttgtttattaggtttttatttgggaggtgggtgagggtataaaattttttttaaggttacgaagggtaaatttggtggtattttagagtttgttgtagaagtggcggtaatttagtattcggtttatatttaggttgatgttacgatttgggtcgggggtgagatgtgagtttttattattttttttttagtttatgtttattagaggtttagggtggagaagagggatgggttttatagaaggaggaaggagtggttgggagggacgttttgggggttatattttgggatatgtaggtatataatttaaatcggagagtatcggtgttatatttaggaattttcgttgggaagttagttttttatagggaagaggtagggggaggagcgtttttagttagttttatttacgttgtgtttttgtttagtttagtttaattttttatatttgtttttttttggttttttttatttcgttgggatttaggttgttgtttagtagttggttgtggaggttttgagggtggagtgggagtagttaggtggttgtgattatagttttacggttttttttggttggtttagtatttagtttatttgtagggagattttatagatgatatttaggggatcgatgatattgtttagagatttgtttatttttcggtcgtgagtatttcgtacgatggtatggaggtagatttgtagagtaggtggggaggtttatgagatttagtttttttttttttcggttttagtgtttcgattaggattgtgtttggtttattttattgtgaattttaggttttattgagtgtttttaagagttcgttgagcgtttttatgtgaattagaagtatttttttttttgggaagatgaagttttgggtataggaattattgagtagggtttaggttggattttaattttatattagttttcgggttaggtttgtttatagttaattttatgttttagttacgcggggtttgcgttgtagtataggacggtaggagaggaggttgggggcgatgggagggtttcggttgttttcgtatttttttaaagggtagtttgttcgtgagttttaggtttagtatgattattcgggttatttagaagaagaggatgttatgatcggtttttagtagtgtttcggggtagaatatatttaggttttttgattgagggtagattagggtgtgaaggggagttaatatttattttttagttttttgtttcgttaagtttcggttttaggaatatatttggttgggttagtttaaaatggataaggggaagaggttagaggagaattaggtatttaatatatttttatttgagagaggttaaaggttagaggttagagggagtggagttttgttttttataattttttttagatttttaaagtttcgttttgttttgttggagattgattttgttaggggatatttcgaattttttggttgttttttttcgggttttcgttttattgcgtttatttatttagtatcgtttattagggttttgttataggtgtagtgattatttaagggggtgtgtttgtttttggtttattttgtttttttttttattaaggatttagtaaatttattattttagtagggtgttttagtagttagttttggttttttgtttatttttttagggggtatcgttgggttattgatagtgataaagtaggttgggatgcgatggttttattatagttgtttggaaatgtattattttttgtaaatgtcggggaggagaaattagggagggtttgatggagtttggttcgagtgagttttgtttagttttcggtaagttttttttatattgaggattttatatatcggatgttgtttatttaggtatgttatgtgcgttgatgggttttaggtaggatgcggaggttatttcgagttatagcggcgttggtagtttgggttattttttcgtagcgaacgtattattgcggtcgtagtagaggttttattacgtttttcgatcggttgggggtatacgtaggtgagaaggttaggcggtaaaattttgaggagttttttatttttttttcgttttaggtttttatttttatttgtaaagtggtattattatggggttgtttttaatgttacggaatagttttcgtttttttagcgttattagtatcgtttttttggttttaaatttgggtaggttttgggtaggaatgaggttttattatggcgatgtttagttatttttttatttttttgattcgggtatttttgttttaggtagttttattaggaaaggcggaggtatattgatgagggtttttcgggagtttatgatgttgatggtttttagttcgtgtcgttgtttaattttatagttattttggttatgtgcgggggtgatttttatagtatttgggtgtatattaggatgtttaggttatgagggattttacggagtttttttttatatttattttttttgttgaaggatgtagtttcgagattatttttggtttttatttgtttaatatagttttttgagaattattttaagttttgtttatttggttgaagtttattttttttttttttgagagaagatggatagttagggtgtagttttagtttttttttttttttataggattagttttttgtttatttgtgttaaagtttatgtttataaatttatcgaagataatgggaaggtttcgagataggaatgggtggattacgttttttttttttaggtgttgggggcggaaagatattaaaaacgtatgaagtagggttagacgtcgtgatttttatttgtaattttagaattttgggaggttgaggtgggtagattatttgaggtcgggagttggagattagtttggttaatatggggaaatttagtttttattaaaaatataaaaaaaaaattagttaggtgtggtgacgcgtgtttgtaattttagttatttaagaggttgaggtataagtattgtttgaattcgggaggtggaggttgtagtgagttaagatggtgttattgtattttagtttgggcgatagagtgagatttttttttaaaaataaataaataaataaaagtatgaaggggtttggtgttatggtttatatttttaatttttatattttgggaggttggggtaggaggtttttttgaggttaggagtttaagattagtatggttaatagagtgagattttgtttttatttaatttttttttttttttttgagacggagtttcgttttgttattaaggttggagtgtagtagagtgattttagtttattgtaattttcgtattttaggtttaagcgatttttttgttttagttttttgagtagttgagattataggtattcgttattataattggttaattttttgtatttttagtagagatggggttttattatgttggttaggttagtttcgaattcgtgattttatgatttatttgttttagttttttaaagcgttgggattataggtatgagttattgtgtttggttatttaattttttaaaaatgtacgaagggttgggtttaagttttttttttttagggttttgattattttaatatttgaatttttttaaatagtttttaatagttttatttttagagttgggaaagaagttgaagattagtttttaatttagttttttttttttagttaggggtttaagtttaatttttttattttataaggatgggagttttttttggttagaattttttttttaattgtggatagttttttatttggtatttggtatttttggggtgtatagttatagttatattttttagtattgtttcgattcgagttgttgttattattattttttcgtcgttatttggggtgatagaaggttttgtggttttggttttggtttttttttgttatttttagtttaggattttggtgtttttggtttttatttgagttttggattttataggtaaaggatacgaggatttcgaattttattttttttttgtagttaggtacggagagtagggtgcgatttgttagtttttttttatttatttgtaaaatgggtatttagaggcgtggtttaggggttagggttagggttagggtagattggagatggagataggttaggttggggggcgtattttaatgttagagatggcggagttgagggtgtaggattagttaataaggcgggtattgcgatagatgatgtttttttcgtgaagtcggataaaggtttttgttatagttgttgagagtttttggggtggaggagggagaagttagagagatgggttttgtgtttggaggtttaggtagatatttagggttttagtgaggttttgtttatatagagttttattggttagtataaagatttttttgaggggagtattttttttttttttttgagggggagagaggattaagggaatataagagtaggtaataagttttgtaatgttgtagatggcgaggaagataattagttggggataagtattggtgtagaggatattgggagtttaggttttatgggagacggggttttgattatgtgttatttggaggaatttggagtttttagagttaagatagggaatatgaagggttatgatatggaaagggttatggcgaggggtgggaagtggtatttgtagttgagttttttatggtgttttatatgggttagtttttgagagagggttataatatttttgtttttttttgtgggggttttattttggggagatttttatttttgttttagttttgatattttttttacgtatagggtttatggtgaaataggttcgattttagtttaaggagttgttaagtttttttaattggtggtaaattcggttattttttttggaagtagataggttgaggttagtattcgtgtttgggttagagggagatattaggtggttgattgggtagtgtggagattatttatttttttgaaatttatttgggttttagagttaattgattttgtttttgtgggagggtttgattttgtggttaaggggttataggtgatagaggttttttggataggggatagggaggtagggttgcgatgtttatagggatgttgtatatttatttttttttttatttttagattttttgtagaaaggtttcgcggtttagttggtgtcggtttagtttttgtttacgttatagttttttttttattattatttgggtggtaatatttgtatggttatagttagggttttatagggtggtttttttacgtatgcggtgtttgttagggggtatggaggattagagggtgagttaggttagtggggtttggtattaaagaaagtagaggttttaggtaaggagttagtggattaaataaagaagtagggaggtcggacgcggtggtttacgtttgtaattttagaattttgggaggttgaggtgggtggattattttaggtgggggagttcgagatgagtttggttaatatggtaaaatttcgtttttattaaaaatataaaattagttgggtatggtggtatgcgtttgtaattttagtattttgggaagtcgaggtgggtggattatttgaggtggggattttaagataagtttggttaatatggtaaaattttgtttgtattaaaaatataaaattagttgggcgtggtggtatgtgtttgtaattttagttatttggaaggttgaggtaggagaattgtttgaattcgggaagtagaggttgtagtaagttgggattatgttattgtattttagtttgggtgatagagtgagatttcgtttttaaaaaataaataaataaaaaaagaaagaagtaggggtggagttggaatttttgtgattttaaagttagttaaggagaaaagatttgaaggaagagttaaggtaatatggaaaaagaataaagataggtatgcgtggtggtttatatttgtaattttaggattttgggaggttaaggcgagtggattatttgaggataggagttcgagattagtttgattaatatggtaagattttgtttttattaaaaatataaaaattagttaggatggtggtgtatatttgtaattttagttatttgggaggttgaagtacgagaatcgtttgaagttgggagggggaggttgtagtgagttgaaattgtgttattgtattttagttcggatgatagagtgagattttgttttaaaaaaaaaaaaaaaaaaaaaaaaaaagaacgaagaggaggtttttgttaaataggatagtaaaagttttaattgttaaaataagttattaaataggaataaaatagtatttggaaatagatataagtaaatttagtgtttgtgaaagttggtattttttattagtaaaataaggataaattatttaaaatgtttgaaataattagttaattatttggaaaaaattttttttttattaatagttataaaaagaaattttagatagattaaagaatttaagttaggtatagtggtttaagtttataattttaatattttgggaggttaaggtgagaggattgtttgagtttaggagttgtagattagtttgggtaatatagtgagatttagtttttgtaaaaaaaaaaaaaaaaaagttaggtatggtggcgtgtatttttgtttttagttatttgggtggttgaggttgaggttgtattaagttatgattgtgttgtgattatgtcgatgtattttaatttggttaatatagtgagagagattttgttttaaaaataaataaataaataaataaataaaaataaaaagttgatataattttattttattaaagtaatgggagtgttttatattttatttaaattacgtttattggaaaaaaaatgtggttattttaagagttttataagaagtatgtggttaggtatagtggtttatatttgtaattttagtattttgggaggtcgaggtaggcggtttattttaggttaggagtttaagattagtttggttaatatggtaaaattttgtttattaaaaatgtaaaagaattagttgggcgtggtggtgcgtgtttgtagttttagttatttaggagattgagatataagaatcgtttgaatttaagtggttgaggttgtagtgagacgagatcgcgttattgtattttagtttgggcgatagagcgagattttgttttaattaaaaaaaaaaaagtagttattttgtttttatgtaaataaatttggaggttaggtatggtggtttatgtttgtagttttagtattttgggagattgaggtaggaggattgtttgagtttagaagtttaagattagtttgggtaatatagcgagatttttttttgattttattaaaaaattgaaaaatagggtcgggcgtggtggtttacgtttataattttagtattttgggacgtcgaggtacgcgaattacgaggttaggagatcgagattattttggttaatacggtgaaatttcgtttttattaaaaatataaaaaaaattagttaggcgtggtggtgggtttttatagttttagttatttaggaggttgaggtaggagaatggtgtgaatttgggaggaggagtttgtagtgagtagagattgcgttattgtattttagtttgggtgatagagtaagattttatttttaaagaaaaaaaaaaaattgaaaaattgaaaaaataaaaacgtaaatataaacgtaaataatttggttattgtatgttatgtgtatttaatagaattgttggttggacgaagtggtttatgtttgttattttagtattttgggagatcgaagcgggaggattataaggttaggagttcgaaataagtttgattaatatggtgaaatttcgtttttattaaaaatataaaaattagttaggtgtggtggtatgcgtttgtaattttagttatttagaaggttgaggtaggagaatcgtttgagtttaggaggtagaggttgtagtaagcgcgtattattgtattttagtttgggaaatcgagagagattttgttttaaaaaaataaaaaaaataaaaaaaaaaataggttaggcgcggtgggttacgtttgtaattttagtattttgggaggtcgaggtgagtagattatgaggttaagagatcgagattattttggtcgatagggtgaaattttgtttttattaaaaaaaatataaaaaattagttaggcgtggtggcgggcgtttgtagttttagttatttaggaggttgaggtaggagtatgttgtgaatttgggaagtagagtttgtagtgagttaagattgcgttatcgtattttagtttgggcgatagagagagattttgttttaaaataataataataataataaaaataaaaaaataaaatatataattgtttttttagtttttagttatttgtaaaatgtataattaaatattatatttttagtgtttagagtagaggtggtatatagttgggtttagtaaatattttttgattatattaatttagtatataagatattagaaaaaatttttaaaatttaaatataataaattttggtttttaaaaatggtaaagttattttaaaatattttttaaaaagatttgttatttagaatattattttgtatttattattaattaaaatattaatagtgaaaataaatagtaatagaaaataggagaaatatttataattaataggaaaattattatataataatataataaaaatatttataatatttaataaaaaaattgatatttagaataggtaaagaatttttaaaaaaaaaattaaaaagaaaaagaacgaagaattaatagaaaaacggggaaaagatagatatagataatttatatatgggtaaatttgattggttaaaaaatatgaaaataggtataattttaatagtaattagaaaggtataaagtaaaataatagaggtatttttttgtttattagattggtaaaattaattaggtaattttaatgtttaggtttagtaagggtggggaaatgaatatttttatagtaatttttggaggtattaattagtaaagttattttgtagggtaatttggtagttttcgtttgtatttaatataggtgtgtttttgtcgatttagtagttttattttttgatagttatattagcgaaatttttttatatatgttttagtaagtatatagagtaggggtatttaattttttggtttttttgggttatatggaagaattgttttgggttatagataaaatatattaatattggttgggagtagtggtttacgtttgtaattttagtattttgggagttcgaggcgggcggattacgaggttaggagatcgagattattttggttaatatggtgaaatttcgtttttattaaaaatataaaaaaaaaattagtcgggcgtggtggtgggtatttgtagttttagttatttgggaggttgaggtaggagaatggcgttaacgtgggaggcggagtttggagtttgtagtgagtcgagattgtgttattgtattttagtttgggtgatagtgtaagattcgttttaaaaaataaataaataaataaataataaaaataaatttaaaaaaatatattaatattaacgatagttgatgagttaaaaaaaaaaaatcgtaaaaaaatttttaaatgtttaaataaagtttataaatttgtgttaggttgtatttaaagtcgttttgggtcgtatgtggtttataggttgtaggttggataaatttgatatatagggatgtgtattagagtaaggtttttaatagaaaaaaaataaaaaataaaaaatagaatgaattattaattaaaaagtgattttaggtcgggagtagtggtttacgtttgtaattttagtattttgggaggtcgaggtaggtagattatttgaggttaggagtttgagattagtttggttaatatggtgaaattttatttttattaaaaatataaaaattagttaggcgcggtggtaggtgtttgtaatgttagttatttgggaggttgaggtaagagaatcgtttgaatttaggaggtggaggttgcggtgagtcgagattatgttattgtattttagtttgagtaaaaagagtgaaattttgttttaaaaaaaaaaaaaaaaaaaaaaaaaaaaaagaatgattttattatggtatagttatattatgagatattatggaataattaaaaagaaggaagttagtatgtgtggtatgtgtgtaaggataaggaaagatttttaagagaaagtattaagtgtaagaagaaagttagattataataagtgtaatatgaattttttatgttaaaaaatagaaaagatttatttaaaaggagaattataaatttttatgggtacgtgtatatgtaagtaaataggaaagatttgggaagatatatattaaagtgataataatggttaaattttaggaggaagtaggtgtggagggggatggttaaggagatttgaaattttaaattttttataagaatatatttatatattttggttagttgtggtggcgtatttttgtaattttagttatttgggaggttgaggtaggagaattatttgaatttaggaggtagcggttgttatgagtcgagatggcgttattgtatttcggtttgggtaatagaataagattttgtttttttaaaaaaaaatatatatatttatatgtttttaattaaatttaaaataatgttattgttattagaaaaagaagggagagattgggtgtggtgttttatatttataattttagtattttgggagtttgagataggagaattatttgagttaggagttggagattagattgagtaataaagtgaaaatttatttttataaaaaattaaattaaattaaattaaaattaaataaagaaagaagggatagaagagagtttgtaagtggcggtgttgtatgggagtattggattaggagaggaagttaaatgattagattggaatgatagagagaagtgtagtattattgggggtagaagtgagtattaatttagaaggagagaggttcggggggttgttagggaaaaggagagagttagattaggtagagggaattagaggaaggtgtagatagaagtttattatcgagttagggagttttggatggcgttggtgagtgtatggtttaggtgtagggagtttgttatattggggggtgggatgtatattatgaagatatttcggggatttgttgttgatatattaggacgttgatggtggagaaggatggtatatgtttaaggttttaggttattttttttagttttttttaggtaatatattttttagttttgtttttttttattttatttattttgggtttgggtagtagtgtttatttattttatattttggtttgaagaagttttgttgtttttattaagggtattaggtagtttttatatatcgagggttgtaggagtcgggtatggggttattgatatttgggggagaggaagggagggtttagtgtcgtggttgggagtattttgggaaggagacgtgttggtagagagggatcgggattttcgttatttatattataggataggtatttgaggggtttagaggtagggtagggggtttgtaattttttattaaataaagtggtgagagtaagaatagagtaagatagggtgaaaatttagaaggggttgttgaggggtgagtttttttttatttttagtatttttttttttttcgggtggggttgggaggttataggtaatgattttaggatttcgttttttttttttttttggttttggttttttttgtttgggagggagaagatataggtttaggtattagttaatttattatcgtatatattaattttttttttagttttattttcgttttattttttttggaggtggttgttgttgttggattttttgtttttgttggaatttttttagtttttttcgtttttttgttttttttttgagttgagtagttgtttttgggagggtaggagtttcggggtttagagagaggtgtagaaatttagatttagttagttggggatttttttggacggttatattaggttttagatggggtattttagatgttcgaggttttgtttatgttgatttttttttttttttttttttttcgtaggattttgttttagtgattttgttatttttaggaaaaaaagaaagtgagttgtatggaaggttttagggaagtttttattttttaatttttcgtttttttttatttggttgatgagagagaggtttggtttttgagtatagaattattttttttagtacggttcggaattttggttgtcggatatacgtgataaattagcgagttatattattttagattcggcgggtaggtgggtttaggatttggaataggaaataaatgattttttttagttattttatagtgaggtttgaggagagtagttttgtttttttttaggtttggtgatttacgtatcggaaaggtagtagtaaggttgtgatagtcgttaggttagttagagtgggggttttttcggttaagtaggtgtgtagtcgaagttatttttttaaggggtttagggttttgtttagggtttttagtatagtttggtaggaaggggaagaagtgtgagataaggtttggtttatttttattttttattataatttaatttatgtggtttttttttattttatttttataaattattatttttgagttttatttttttatttaaatagttataataaaaatatttttgggcggattacgaggttaggagatcgagattattttggttaatatggtgaaattttatttttattaaaaatataaaaaaaaaatagttaggcgtggtggcgggcgtttgtagttttagttattcgggaggttgaggtaggagaatggtatgaatttaggaggtggagtttgtagtgagtcgagattacgttattgtattttagtttgggtaatatagcgagatttcgttttagaaaaaaaaaaataaaatatttttgatttatttaataaatttttatttaatatttatgtgttagatgtaatatgttaagtatagaagtaaagattatatgaggtattttaataattgttaggtttagaatattaataaatatgtattaagtatttttttagggaatgagaggaaaatacgaatagatggatagaattttgatttggtagagttaatatttttgtaggggaataataaatgagtaaatataaaatgaagtgttttattttttttaatttttatgaagaaaaataaagtagaatgaggggaataggggttaggcgtggtggtttatatttataattttagtattttgggaggtcgaggcgagtagattatttgaggttaggagttcgagattagtttggttaatatgataaaattttatttttattaaaaatataaaaaattagtcggataaggtggtgggcgtttgtaattttagttatttagaaggttgaggtaggagaatcgtttgagtagtgagttgagatcgtattatcgtatcgtggtattttagtttgggtaatagaaggagatttcgttttaaaaaaaaaaaaaaaaaagaaaagaaaagaaataaaagaggggaataaatagggaattttagaagagagggattttattttatttgtttgtttggatagatattttgaatgtaaggattttattgtagatagggtgattataatatgagggagtaagttagggtttgttatatttatttatttatttaagaaatattaattttttattatgtgtttaatattatgtaaggaggtagagttgaaagtatattaaggtataggttttttttggaaggattgatagttataatttggtagggttatttttttttttatttattttttttattttattttttttttatttttttttagtaattgttattttttttttatttagtttttttttataatttaaataatttttatttttattaattttagatttattaaatttttattaagagattttaaaagtgtttggtattaaattatgtgttttgcgtatattttttaattttattaatttagtgaggtaagtattatattaatttgtttgcgtgtttatagatataggaagattaagatatagcgggtttatgaaacgtgtttagggttattatattagttggtaatttgggatttgattattttttttttatatttgatgtattatttttttgttttattgtttattttagttttcgttttttttttttgaatttttttttttttttttttttgtataatttttttatttgggggttttgggtcgagtttcggagttttagggtcggtagcgttgttttataggtagttggtattaatttcgtgtcggcgtaattgatttattgttggataaggatagtcgttcggttgttttttgggttttttaggtttgttggttatagtagttgggttatagtcgtggttttttatatttagagtttatcgggtttttgttttagggtcggtaggcggggtgggggaaagggagttttgttagtcgggggtggttggagatagatgcgggggtgggtttttttttattcgggattttttttagtttttttatagcgagcggttatgagggttcggaggttggggaaggtatttgggtgaggggagacgtagagggtggatatagttatgagaaggttcgaacgaagtggaaaaatttaaggagaaagagagataggggaagattgcgggatcgaggtgggttttatgtttgagtagagaggggatttttacgggagttttttcgtcgtagatattcgagttttataggattgagggtttgattaggtaggttgttaggagtcgaggatttggtttttagaggggtagtgttagtggggagtttttggggaagaggaattatttattatcgcggggtttcggggagtgtggaaggtttttaggagcgggtcggcgtttggttggatgcgggttcgagtcgcgtgtacgtattggagggagatggttagattgggtcgggaatttattttatagttaggcgtcggtcgcggttggatcggtcgagcggttcgggcggaggagtcgagcgggtagagacggtgggcggttttttaggtgattttagttttttaagatcgtcgtttcggtagtcggcgtttacgtgtttttttttttgtgatagggagcgttttcgggtttgcgggttttggcgggggcggtcgtgtttcgtttgcgagtgcgcgttcgtcgtgttcgatattgtttcgggggtcgcgcggttcgtcgttcgtcggttttacgaggaatagcgcggggcgcggggcgttgggcgcggacgtaggacgagaggatatttttgagtacgacgttttcgttaggcgtcgttacgggtattttgtgcgggttttcggtcgggtggcgagggcggcgtttagcgggtagttagggaattggtttaagagggtcggtcggttttgtcggtggagggcgttttttattcggtagcggggaggtgtttagtagggagtcgtttgatgaggatcgaaggggaggtttatttgtcgaggttttggcgtttagttttttttttgagttttatttttttatgtattaaaaaagggtgacggtcgggcgtagtggtttacgtttataattttagtattttgggaggtcgaggtgggcggattatttgaggttagaagtttaagattagtttggttaaggtggtgaaagttcgttttacgtttgtaattttagtattttgggaggttagggcgggtggattattaggttaggagtttaagattagttaggttaagatggtgaaatttcgtttttattaaaaatataaaaattagttaggtgtggtggtaggcgtttgtaattttagttatttcggagtttgaggtagggaattgtttgaattttggaggttgaggttgtagtgaattgagatcgtgttattgtattttagtttggcgatagagttgtagtatttgtaaaaatataaaaattagttaggcgtggtggtatatatttgtaagtttagttatttgggaagttgaggtaagaagattatttgaatttgggaggcggagattgtagagttaagattatattattgtagtttagtttgggtgataaagtgagattttattttaaaaaaaaaaaaaaaaaaaaaaattagtcgggtatggtggtgggtatttgtaattttagttatttaggagttgtggtaggagaatcgtttgaatcgggaggcggaggttgtagtgagttagattaagttagtgtattttattttgggtaatagagtgagattttcgttttaaaaataaaaaggagggttatattagatggtttttaagggttttttaaggttgagaagttttatttgtattatgaatttatatttgttgaatgagtgaatgaagtttagtaatttttagttataatttttttttaaaatataaattatattatttgtatttattttttatatatatttagaaaatatgaattgatttggttggattggtgaagtttggtagtatgaaatgtattttacgatattattatattaatggaaggatagtaagtattttagttgtaggtatggtataagtaaaaggttatagggagaatatataggtagggatatgttggggaaatatggtgtagagtaattgtattatatgttttatattaaggagagtagtgggaagttgagttggatttttggttgggttaacgtagagtaataggggtttggatgaattcgatatttttttttatgttttagttttttgtttaatatatagtaatagaattaaaatataaatttgtattataaattttattttcgatgcgggatagattttttttatttttaaatgaattatatgttgttttggaaagatttaggaaatttttttattatttttagagaagtagtgagaaaggtaggtgttggggattgggaaggttttgaagttttttagtttatttatttttttttttttaagagaggatagttgttttttattattttttttatttatttattttttaaaaaaaatttataaaattattattagtaaaaaaataaaatttttttaagtattgggggttaggggttttgggttgggatttggggttatgggttattaatgaaagagggaggggaagaggaggaggagttattattgtttttgttgtagggtttttttttttgtcgtattttgtagtaattgtgtgtcgattttatttgttggtagttgtacgtatcggattattgagtttcgaatgaagtagttttttattgataattagataaagatggataaatatgaaaatatttttaaaaatgttttttaattatttaggggttttttgttttagaggtgtttttttttttttatagattttaatttattatgtgagggtattttttagggtttgtgatattgatgttagttagtttgatgttgagatattaggaaaggaagatgaatattattattattattattatttttttttgagataagagttttgtttttgttgtttaggttggagtgtaatggtgttatttcggtttattgtaattttcgttttttgggtttaaatgatttttttgttttagtttttcgattagttgggattataggtgtttattattacgtttagttaattttttgtatttttagtagagacggggttttattatgtttgttaggtttgttttgaatttttgattttaggtttcggttttttaaagtgttgggattataggcgtgagttatcgtgtttggtcgacgaatattattattaattttagagatatgatgtaagaatttaatttttaagttttttttttttttttttaggaattaattttggggttcgtgttatattttatttgatttatagaatggagggttttatagatgttgttaagggtagagggagagaagaattaaattagtttataataaagttaatatagaggtgattttagagttgggatgagaatatgattgggagaagttaaggatttgaggatgttagaaaaggtagaattaaaagggggtatttttaagttttggagtaggaaagataattaatagagtagtttatttttaattttatattttttttttttaaattaatttattttttttttttttttttttttttttgagatggagttttattgttagttaggttgaagtgtagtggtgtgattttggtttattgtaatttttgttttttaggtttaagcgatttttttgttttagttttttgagtagttaggattttaggcgtatgttattatgttcggttaattttttatttttagtagagatggggttttattatgttggttaggttgttttttaatttttgattttaggcgatttgtttattttagttttttaaagtgttgggattataggtgtgaattattgttttcggttaaattaatttatttttaatagttattattaaataattggtaaaggttagatttgtattttatatagtatttgtaatttttatagttattttttaaagtagttattattttttaggggtttagagaggttgttttaaattttatgagtttagaataaatgggaattttagtttaagtttgtgtgatttttaaaattattagttattttttttttatttttgcgatagggttttattttatggttaaggttggagtgaaatggcgtgattatggtttattgtggttatttgagtagttgtgattataggtttgagttattatgtttagttgatttttttttgagatggagtttcgttttgtcggttagtttggagtgtagtggtataatttcggtttattgaaagttttattttttaggtttacgttatttttttgttttagtttttcgagtagttgggattatagatgtcggttattatttttggttaattttttgtatttttagtagagacggggttttatcgtgttagttaggatggtttcgattttttgattttatgatttgtttattttagttttttaaagtgttgggattataggtatgagttattattttcgattttttttttttttttttgtagagaaagggttttattgtgaatgttatttaggttagttatttttaaatatttattgttttggaattagagtttatatgtggataaaggtaggtagtattatttttgatgatgtaggtatgagtgatgttttttttattttttaattttcgagttttttgaaatgttatttgaggaatgttattaaaatattagtgttttttgagagaatggtgtaaaaatttaaaaaaatagtttttggttgggaatggttgtttacgtttataatttaagtattttgggaggttgaggtaggaggatcgtttgaagttagttggagaatagtttagataatatagtaagattttatttttattttaaagttataaaataaaataattgtggtcgggtacggtggtttacgtttataattttagtatttagggaggacgaggcgggcgaattacgaggttaggagttcgatattagtttggttaatatcgtgaaattttatttttattaaaaatataaaaaattagttgggtatagtggtagacgtttgtaattttagttattcgggaggttgaagtaggagaattatttgaattcgggaggtggaggttgtagtgaggcgagatcgagttattgtattttagtttgggtgatagagtgagattttattttaagaaaaataaataaataaaaataatcgtaataaatagtagttttaaaaacgtttttattttgttaaaaataaagttggtagttttttgttttaatttttgtaaaattttgaaagtttttaaaatttagcgtttaggttatgtgcggtggtttatgtttataattttagaattttaggaggttaaggtgggcggattatttgaggttaggattttaagattagtttggttaatacggcgaatttttatttttattaaaaatataaaaattggtcgggcgtggtggtttacgtttataattttagtattttgggaggtcgaggcgggtggattacgaggttaggagatcgagattattttggttaatacggtgaaatttcgtttttattaaaaatataaaaaattagtcgggtatggtggcgggtatttgtagttttagttatttgggaggttgaggtagaaaaatggcgtgaattgggaggtagagtttgtagtgagcggagattatattattatattttagtttgggtgataaagtaagatttcgttttaaaaaaaaaaaaatataaaaattagttgggtattgtggtgtgtatttgtaattttagttatttaggaggtgaggtacgagaattatttgaatttaggaggaaaaaaaaaatttaaaaataaaatataaaaatataaagattagttgtgtgtggtgtatgtttgtagttttaggtatataggaggttgaggtacgagaattatttgaatataggaggtagaggttgtagtgagttaagattatgttattgtattttagtttcggtgatagagtaaggatttgttttaaaaaaaaaaaaaaaaaaaaaaagatttatttaaatatgttttaggaaattaatttaaatgaattagtattaggtaattattattttttttgagatagagggtgagtttttgtttaataataaaaataaaaataaatatttagtatttgaaatttattgttttagtaatgtttttattatattgttagttgttgaaaaatatttgatagtattttattatttttagtagtgaaataatatttgggaattgtataaagtggtgttattttattaagttttttaaggagggggagatatatagtataaaagtggtttgataataaatataagagaaagaatttttggttaggcgtggtggtttatatttgtgattttagtattttgggaggttgaggtaggaggattatttgaggttaggagtttgaggttagtttggttaatatggtgaaattttatttttattaaaaatataaaaaattagttgggagtggtggtatgtatcggtaattttagttattcgggaggttgaggtggaagaattatttgaatttaggaggtagaggttgtagtgagttaagatcgcgttatcgtattttagttagggtaatagagtgagattttgttttaaggaaaaaaaaggagaaagatttttttttttattttaatagaaaagttattttaaagttatatatatattggtttatatttgtagttattgtattttgagaggttgaggtgggaggattatttgagtttaggagtttaagattagtttgggtaatacggtcgagattttgtttttatgaaaaattttaaaaataatataaaaaggtcgggtgtagtggtttacgtttgtaattttagtattttgggaggtcgaggtaggtggattacgaggttaggagtttaagattagtttgacgaagatggtgaaattcgatgtttattaaaaatataaaaattagttaggtatggtggtaggtatttgtaattttagttatttgggagattgaggtaggagaattatttgaatttaggtagtagaggttgtagtgattcgagattatgttattgtattttaatttgggtgatagagtgagattttattttaaataaaaataaataaataaatagaaaaaaaagaaggttgggcgtagtggtttatatttgtaattatagtattttgggaggtcgaggtgggtagattataaggttaggagattgagattattttggttaacgtggtgaaattttttttttattaaaaatataaaaattagttgggcgtggtggtgtatgtatataattttagttattcgggaggttgaggtaggataattatttgaattagggagtcggaggttatagtattattgtattttagtttggcgtagattcgattagagcgagattcgttttaataaaaaaaagaaaaaagaaaaagaaaagaaatgttattacggtcgggtgtagtggtttatatttgtaattttagtattttgggaggttggggtgggtagattacgaggttaggagttgggagattagtttggttaatatggtgaaattttgtttttattgaagatataaaaaatgagttaggcgttgtggcgtatgtttgtaattttagttattagggaggttgaggtaggagaattatttgaattcgggaggtagaggttgcggtgagtcgagattacgttattgtattttagtttgggcgatagggtaagattttgttttaaaaataaaataaaataaaaaaaataaaggtattttagggtttagggttataatataatagttaggttttttatgtaaaaggtttaggaaggagaaaagaggagaattaaaaataagttattatattaaattgtttaagattgatagtgattatcgtatttgttttgttttgtggttttaatttatatatattaatattatttgtattgttagtgttataaatggaaatttgtgttttaaaacgtaaaggtttttaagtttttttttttattattttttgttttgttaacgtgtaatttatgaaaaaattattttatatagaaatgtggaagatagttagatatagtggtatatatttgtaattttagtattttgggaggttaaggtggtaggattgtttgagtttaagagttttagattagtttcggtaatatagtgagattttgtttttttaaataattaaaaaattagttgggtatggtggtatatagttttagttatttaggaggttgagtgagttatggtggtgttattgtattatagtttggataatagagtgagatttttattttaaaaaaataaatgtggaagacgtttttgggaagagaatataattgattttatttttttaaaggataatgaggtaataggtattaatattttaaatgtattttttttttttttttgagatggagttttagtttgtcgtttaggttggagtgtagtggtttgattttagtttattataacgttcgtttttcgggtttatgtgattttttagttttaggtttttgagtagttaggattataggcgtataatataatatttggttaatttttgtatttttagtagagatggagttttattatgttggttaagttagttttaaattcgtgattttaggtatttattcgtttcgattttttaaagtgttgggattataggtatgagttatcgtatttggtttaaatgtatatattatttaaaggattgtatagataagtatagggttaggtgtgttggtttatgcgcgtaattttagtattttgggaagttgaagtaagaggattgtttgaatttaaagaatttgaaattagtttgagtaataaagtgaggtattgtttttaatttttaaataaataaatattattttaagaaagaaagtaggattaggcgtagtggtttacgtttgtaattttaatattttgagaggttgaggtaggtggattataaggtcgagagtttaagattagtttggtttagatggtgaaattttatttttattaaaaatataaaatttagtcgggtatggtggtgggtatttgtaattatagttattagggaggttgaggtagagaattgtttgaatttaggaggtagaggttgtagtgagtcgagattacgttattgtagtttagtttaggtgatagattgaaattttattttaaaaaaaaaaaaaaagaaagaaaaaaagttggatagaattatattttagttgtgttatttattagttttgtagatttgaataagtggtatagttgatttaagttttagttttttcgtgtaaaatagtaatagtatatattatttagtagtgtttgagaaattaattaataaatgtatttagaatagtggttagttaatacgttttcggatattatttttttttttttaagtatttattatataattggtttatgttaggtattagatatattatatggttttattatgttggttaggttgttttcgtttttttgatttcgtgatttattcgttttagttttttaaagtgttgggattataggtatgagttatcgtgtttagtttatggtttgtttttttttttttttttttttttttttttttttgagacggagttttgttttgttatttaggttggagtgcggtggtattattttggtttattgtaagtttcgttttttaggtttacgttatttttttgttttagatttttaagtagttggaattataggagtatgttattacgtttggttaattttttgtatttttagtagagatagggttttattatgttaaataggatgattttaattttttgattttgtgattcgtttgtttcggttttttaaagtgttgggattataggcgtgagttatcgcgttcggtttggtttgttttttttttgagatagagtttttttttgttaattaggttggagtaaagtgatataattatggtttattgtagttttgattttttgggtttaagtgatttttttattttagtttttcgaatagttgagattataggtatgtatattatatttggttaattttttatagaaatagaggttttattattatgttgtttagattagtttcgatattttggatttaagtgatttttttgttttagttttttaaagtgttgagattataggtgtgagttattatggttagtttagtatttattttttttttttttttgagatagaattttattttgttatttagttggagtgtagtagtgtgattttagtttattgtaatttttgtcgtttaggtttaagcgatttttttgttttattttttcgagtagttgggattataggtattagttatcgtgttcggttaatttttgtatttttagtagagatagggttttattattttgatcgggttggttttgaatttttgatttcgtgattcgtttattttggttttttaaagtgttgggattataggtatgagttatacgtttagttcgtgagttattgcgtttgatttgtatttattttttaaattatatattgttttgtattgttttttaatatacgatataatttttaagtttatttgtaaatttaaggtataaggtatttatttattgttaaattttaaaattttttttagagatggggttttgttttattgtttgggttagagtgtaatggagtaattattgtttattgtagttttaaatttttgggtttaagtttttttttttttttagttttttaaagtgttgggattataggtttgagttattgtattttatttatttattttttttgtatattttttatttcgtttagttttgaaatattttttaaattaaagaggttttagggttttgggtatatttatttttaatagatttgttggaataggtatttattttaggttattttttagttttacgattatatttttgtttataagggatttgaaaaaagaatagaagagttattgggagagagggggaaaattattatgtgggaaggagtatggtagggaggagtgttttttgatagtattattaaatattggtattgtgaattttattgtatttttgatagtttttaaaattttataggaaagaataattggttgatagagttgaaaggttggagtttaaattattttgtatattgtattgagtttattatttaaagttttagagagattttgttttgtatacgtcggtttttttattgtgtttttttagtcgattatttttttcgggtatttgtttattttttttaatgaattgtagaaaatattttattcgtattttgtcgaagtttgtttggtagagaagtgttttgaggtttaattttttcgtttttcgttatttttattgaattttttttagggttggggtttttttttttattatggaaaaaatattttatttgtttttagtgtttttttaatgaatttgagaaatagtatagtattaaagatgaagataaaaatttcggatttaattttagtttaggggtataaaggttagatttttcgttttaattatgcgaggttttcgagggcgtttttttttgacgttacggtatttattatggtgttggcgtcgcgggtagcgggtcggatcgggaagatagtagggtgttgcgagtaggtttggggaaatcgaagcgcgagttcgcgcgtggggcgaggcgggatcgcgtaggcgtagcgggaagcgacgtagaaagttttaagcgttgacgggtaaagcgcggtcgatttgcggttggggagcgtaagttgggtagagtagaggggaggaggaagtcgggaaaggggcggggttttttttatttcgattttttttttggtcggtcggtttttattgcgtaggcgcggattttagtttgggttgttagacgggtggcgggatttagcgtttgagtttaaaggattttgtttttttttagaattttgttatttatagcgtgatgtgtttgtgttttatatatattttttatcgagaattgtggggagtttgttaagattatgaagtgtgtatttttttatatttgttaaagtaaaaatataaaatttaaaaaataaaattaaaaaatgttttgaattttaaatttagttgataaaaagaaaaaaaggtcgagggtcgtggtttaagtttttaattttagtattttgggaggtttaggtgggtggattgtgtgaggttaggagttcgagattagtttagttaatatggtgaaattttatttttattaaaaatataaaaaaaattaggcgtggtcgtaggtttttgtaatattagttattcgggaggttgagggaagagaatcgtttgaatttgggaggcggaggttgtagtgaatcgagatcgcgttattgtattgtagtttgggcgatagagtaagatttcgttttaaaaaaaaaaaaaaaaaaaaatgatcgggagtagtggtttatatttgtaattttagtattttgggcggttaaggtaagtggatcgtttgaggttaggagttcgagattagtttggttaatatggcgaaattttgtttttattaaaaatttaaaaattagtcgggtgtggtggtacgcgtttgtaaatttaggaggtataggttgtagtgagtggagattttgttattgtattttagtttgggtaataagagtaaaattttattttaaaaaataaaaaatgttgaggtttgtaaattttagtatttggggaggttgaggtaggaggattatttgaatttaagagttatagtgagttataatttttttattgtattttagtttgggtgatagagcgagattttttttagaaaaaagaaaattataaataaataaacgttgagtagttttagagataaggaggagttggagtataaattttgattttattaaaggttattaataaatatatttttttaaaggagttaattttaattttcgtattttttatatatttttgttaagattgttttgtaaaggattgtgtaaaattaaagagattgtggtttatagatataaataatttagtttaatattttattgttaaatgttttaaatataaatagatagaaatgtagttatatattattttaatttatattttttaggtttttataaatatgtattaggatataggtaaaagaaaaaaatgtttttgagatggagtttcgttttattattaggttggagtgtggtgttacgattttagtttattgtaatttttacgtttcgggtttaagcgatttttttgttttatttttttgagtagttgggattataggtacgtattatcgtttttagttaatttttgtatttttagtagagacggggttttattatgttgggtaggatggttttaattttttgattttatgattcgttcgtttcggttttttaaagtgttgggattataggcgtgagttattgtgtttagttggtaaaaatatttttttatggattgagattttataaaatttgtatttgttattttgtatagatatatttatttgttaagagtttgttatagaaatattttttggggttgggtacggtggtttacgtttataattttagtattttgggaggttgaggtgggtggattatttgaggttaggagtttagaatagtttggttaatatggtgaaattttatttttattaaaaatataaatattagtcgggtatggtggtgagcgtttgtaattttagttatttatgaggttgaggtaggagaatcgtttgaatttgggaggtaaagtttgtagtgagtcgagatcgtgttattgtattttagtttgggcgataagagcgaaattgtttttaaaaaaaaaaaaaaagaaaagaaatattttttttatgtaatggatgtaaataatgaattttgtgagtgtatagatgttgaattttttggattttatttataagtgatattaggatattaagtaggatttgtttttttatttttagttgagttttaaattttaaaattagtttgtaattgattaaaagtagttatagtttgttatttgttttatttgtgttaaaggtgtttgaggattaaaaattatgtggttgattgaaataatgagtttatgggtcgggtacggtggtttacgtttgtaattttagtattttgggaggtcgaggcgggcggattacgaggttaggagatcgagattattttggttaatatagtgaaatttcgtttttattaaaataatataaaaaattagtcgggtatggtggcgggcgtttgtagtgttagttattcgggaggttgaggtaggagaatggcgtgaatttaggaggtagagtttgtagtaagttgagattgtgttattgtattttagtttgggtgatagggcgagattgttttttaaaatatatatatatatatatatatatatatatatatatatatataaaatgagtttatgaaaatttaaatattttatttttattaatttaattatttatagtgattttataattagagaatatatgttttttttatgaatttttttttttaaggtatatttatagtttaaatattagaagtaattttttttacgaataaatttattgattgataaataagtatttatataggaagaagaatgttagggtggttggaaataatagatatttaaatatattatacggtttaaagaggggtttagtttttttgagtttattttaaagttagaaataggatgtgagggagtgtgataggtggtgtatgagattttttttttagaatttttaagggatggtaatttagatttaggtttggttaagaataataatgatgtttgaagatgaggggaatgaaatatatgtagaggtattttaggatgttttagttttaaaaagaattaatttatttttttaattgtggggtttgtggtaggttttttaggtatatattttgtttcgtaggtaggtttagtgtattttttttggtagagttttgtgatgatagggttatatatttgttttaattttttttttttatgattaaatttatttttttttgttagttgattgatttttagttacgaaaggagttcgttgtatttatttaatattttatttttattagatttattaattttgttttttaaatttttattatttataatattttttatgttaaaagtataggattttaaggtattttttgtagtaattttttttttttggattttatttttagttttatattttttagtatttagaattatgcgtttaattttttttttgtttaggcggtttttgttattggtgatggtgattttgtttattttgtcggtgtttttgtttatggttgtgatattgagaatattattggtattaatgttaaacgttatttcgatttgaggaatttttttgggtgttggagggattttagttaggttaaatcgttttagtaggttgttgttttttgttatggttttttcgtttttatatatttggattagtatttcgggttggttgttagagtaggtggtgaaaatttgtgtttgtttggtggggatggtggagttgcgttttattagggtagttattacgtttttagtcgtttttagttttagggataggggagttacgtttagtagtagtaggttttgtatttttttagatttgttttttattaggatggttgtttgtatcgtagttttatatgttacggttttattagggttgatgtttttgttgagattacgtttattgaagtagttttgaagtagtcgttgtattttggggatgcgggtggagttttttattaaaataatgttatggattttagttttatttattttggtatttcgaagcgttttttttataggttttagggtatttttaaataggtttgtatataattttttaaatcgagttttggtgatggatgtatagaagttaatgtttttataaagtgaattaatttttaggttggtttgggtgttggacgatagggtttttttggttttttcgtaggcggtgcgtagtcgttttacggttcgtttgttttggttgatgttttttttgtgtttttttttgaatttttttacgaagtggtttataagtttgttgttaaagttttttttatttaggtgagtgtttttagtagtggtttttattttaaaaattttattatttatggttagaattgatatattaaatgtgtttttatttagattaaaaattaggatatgtcgttttttttgattttttttatttaaattataggtaatggtagtagtcgtgggtttattgatgatttttagtatattaagtttagtaattatatttgtatttttagtagtttgacgttgagagttattgaaataggttggtacggtaattattgtattggtgatagggtggtttaaaaaggttttagtagttttttttaatttagttaatattatcgaagagatttttttagggtagaaagttttatttttttttttgtaggatataaggattttgggtttgttttttttattaattatttgaaaaggttaaagttttatatttgtttgtataataggattattaaattttttgtcgattagacgtttagtattaaaaatagtgttttggggatttattgttatttggtttttggtcgtatttttaatgagtcgttcggtgtttgtgaaggttacgtagttgggggtggtgcggttgttttggtcgttggcgatgatttttattttgtcgtgttggaatatttttatataggagtaggtggtgtttaggtcgatgtttatggcgatttttttggtagtagttatggttttttgaggtttatggagaaagaataagatattgttttgggagagtgttttttaatgttatttatttttttgagatagggtttttttttgttatttaggttggagtgtagaggcgtagttatagtttattgtagttttgattttttaggttttagtaatttttttgttttagtttttagaataattggagataatatgttcggttaattttttttttttttgagacggagttttgttttggattgtagtggtgtgatttaggtttattgtaatttttattttttgagtttaagcgatttttttgttttagtttttcgagtggttgggattatgagggtattattacgtttagttaatttttgtatttttagtagagatggggttttacggttttattatgttggttaggttggttttaaatttttgattttaggtgattcgttcgtttcggttttttaaagtgttgggattatatacgtgagttatcgtgattagttttttgtttggttaatgttttaattttgtgtatagatggggtttttttatgttgtttaggttggttttaaatttttttagggtttaaacgattttttagttttagtttttttaagtattgggattataggagtgaatatttcgtttagtttattttttattttttattgtggtaaaatatatataaattgtattattttaattatttttaagtgtagagtttggtagtgagtttaattatagcggtgtttaattaatttttagaattttgtttatttcgtaaaattgaaattgtatatttattaagtaattttcgtttttttttttttttatcgtttggtaataaatattttttttttttattttttagagatagggtttcgttttgttacgtaggttgtattgtagtggtgtaattatggtttattgtagttttgattttttaggtttataggatttttttgttttagttttttaagtagtttggattataggtgaatgttattatatttagttaattttttatttttttgtagagattaggtttttttgttgtttaagttagttttttatttttgagtttaaggaaatttttttttatttttaagttattaagtgttaggattataggtttgagttaaggcgttcgattttttttttttatttttatgaatttgattatttttgtaattttatataagtggaattatatagtatttatttttttgtgattttgtttatgttatttagtttatgtgtataggttttatttatgttgtaatatgttataattttttttttaaggttgagtaatatttatatttatatattattgtttttgattttgttttgagatagagttttattttgttatttaggttggagtgtagtggtatgattttggtttattgtaatttttattttttgggtttaagttaattttttagttttagtttttcgaggagttgggattataggcgtgtattgttacgtttagataatttttgtatttttagtaaaaatagagttttattatgttgattaggatggttttaaatttttaattttaagtgattcgttcgtttcggtttttttaagttttgggatggtaggtatgagttattatcgtattcggtttatatatattttgtttatttatttttcgatggatatagattatagaatttatagaataatgttgttatgagtaagtttatataaatatatggagacgttattgttatggtagattgttttttggatagggtagataaaagtatttttagttatttaaagaagttgggaagtaagtagttgtatattgtttttaattttttaagtgatttaattttattgttttgtttttatatattttattgtgggattttgtttttttatgatttaagagtagtgtatattttggtttttttaagagatattagtttttatatttgagttttgttgtttttttgggataatattttttattaggggtttatcggtagtaaattttagttaggttgaagatgattgttagaaaattataagttttttagtttttttaaacgatatggtattttagatagtatttgtattttttttttaaataaaatttttgttttttggagttaataattgattaataaagggtttaagggcggggggcggtggtttacgtttgtaattttagtattttgagaggtcgaggcgggcggattacggggttaggagaacgagattattttggttattattttggttaatacggtgaaatttcgtttttattaaaaaatagaaaaaattagttgggcgtggtggcgggcgttagtagttttagttattcggatggttgaggtaggagaatagtttgaattcgggaggtggagtaattagtcgggcgcggtggcgggcgtttgtagtttttgttattcggaaggttgaggtaggagaatggtttgaattcgggaggtagagtttgtagtgagttaagatcgtgttattgtattttattttgggcgatagagcgagatttcgttttaaaaaaaaaaaaaaattaaaaataaataaataaaaataaaataaagggtttagtgtttatttttttttatatcgtagatttttaggtcgtattttttttttttcgttttttagttatttcgttttttttttatttcgtttttttcgtttttttattttttcgataggtcgtatttttttttttcgttttttttattttggttgtttcgattaattaatttgaagttattttagttttttttaagtgttttttttattcggattagttaacgtttatatattttaggtttaaattaattagggaattttttagtatttttttaaataaggatttattgagttttttaggtttataattaattagatttttattggtttatttagtttttcgacgttttcgttttagtttggaaacgtttagattacgtagttttagcgagtaggtgggggtttttttaatattaaattgtataatcggggtttttttattttttatttcgtttttttttgtaaatttgagacggttttaatttagtaatttttttttaaattggtttatgaggttagagatagtatttttattgtaacgtggtcgggcggtgttaatataaacgtttttatttttttttggacgcgcgtaattcgtttttcgtattagttttttgtttataattgcgtaggtttagtaagtttttataattaaaagtttagcgtcgattttttttgttaattaggcgttgaagcgtaggcggttagtatcgttatggagattaatattttttttatcgttatttttttttttttttagggtttttgttttttttagtgaattttagaagattttggagagttttgagtagggggcggtattttggtttttgattggtttaaggaaggttggggggtaggacgggaggcgaaatttttggaatattttcgatttggtagttttatcgagttcggtgattggtttagaagggaaaaggcgggttttcgtgacgatttataaaagtttaggggtaagcggttcggataacggttagtttgaggagttgttgcgatagtttattatttttttcgagagtgattttcgttgttttaaggttttttagagcgaatttgtgcggttgtaggtatcggcgcgtcgagttttcggcgttcggaaggatcgagtttttttcgcggatttagtgtttcgtttttagtttttaattttagagtcgagtcgatagagagtagggaatcggtatggttaaagtcgcggcgatcggtatcgatttgggtattatttatttttgcgtgggggtgttttaatacggtaaggtggagattatcgttaacgattagggtaatcgtattatttttagttacgtggtttttacggatatcgagcggtttatcggggatgcggttaagaattaggtggcgttgaattcgtagaatatcgtgtttgacgcgaagcggttgatcggtcgtaagttcggcgattcggtggtgtagtcggatatgaagtattggtttttttaggtgattaacgacggagataagtttaaggtgtaggtgagttataagggggatattaaggtattttatttcgaggagatttcgtttatggtgttgattaagatgaaggagatcgtcgaggcgtatttgggttattcggtgattaacgcggtgattatcgtgtcggtttattttaacgattcgtagcgttaggttattaaggatgcgggtgtgatcgcggggtttaacgtgttgcggattattaacgagtttacggtcgtcgttatcgtttacggtttggatagaacgggtaagggggagcgtaacgtgtttatttttgatttgggcgggggtattttcgacgtgtttattttgacgatcgacgacggtattttcgaggtgaaggttacggtcggggatatttatttgggtggggaggattttgataataggttggtgaattatttcgtggaggagtttaagagaaaatataagaaggatattagttagaataagcgagtcgtgaggcggttgcgtatcgtttgcgagagggttaagaggattttgtcgtttagtatttaggttagtttggagatcgattttttgtttgagggtatcgatttttatacgtttattattagggcgaggttcgaggagttgtgtttcgatttgtttcgaagtattttggagttcgtggagaaggttttgcgcgacgttaagttggataaggtttagatttacgatttggttttggtcgggggttttattcgtatttttaaggtgtagaagttgttgtaggatttttttaacgggcgcgatttgaataagagtattaatttcgacgaggttgtggtttacggggcggcggtgtaggcggttattttgatgggggataagttcgagaacgtgtaggatttgttgttgttggacgtggtttttttgtcgttggggttggagacggtcggaggcgtgatgattgttttgattaagcgtaattttattatttttattaagtagacgtagatttttattatttatttcgataattaattcggggtgttgatttaggtgtacgagggcgagagggttatgacgaaagataataatttgttggggcgtttcgagttgagcggtattttttcggtttttaggggcgtgttttagatcgaggtgattttcgatatcgatgttaacggtattttgaacgttacggttacggataagagtatcggtaaggttaataagattattattattaacgataagggtcgtttgagtaaggaggagatcgagcgtatggtgtaggaggcggagaagtataaagcggaggacgaggtgtagcgcgagagggtgttagttaagaacgttttggagttttacgtttttaatatgaagagcgtcgtggaggatgaggggtttaagggtaagattagcgaggtcgataagaagaaggtgttggataagtgttaagaggttatttcgtggttggacgttaatattttggtcgagaaggacgagtttgagtataagaggaaggagttggagtaggtgtgtaattttattattagcggattgtattagggtgtcggtggtttcgggtttgggggtttcggggtttagggttttaagggagggtttgggttaggttttattattgaggaggtagattaggggtttttttaagattgttgtttttgttttggagttttaagattttgtattttttagtatttttgtttgttagtttttaattttttgtgtttgtaatgttgaaattttttggtgaagtattgaatttgtttttttttcggtttttatatgtagagatgaatttatattgttattttacgattattttttttttttaatatatttaatttaggttattttttaagttggttattttaaagtaaataaattttaaaatttaagtgatgttttttatttttttatttgggggttagtagggtttgtataggttgttttttttatagcgtttaaaatggaatggtatttttgtttttagtaagggtagattttgtagaggtgtgattattgtaatgtgatttatttgtgttagataaatggtattttttagtaaagttttttgattttggttaggagtggtggtttaagtttgtaattttagtattttgggaggttgaggtgggcggattatttgaggttaggagttttagattaatttggttaatgtggtgaaattttgtttttattaaaaatataaaaattagttgggcgtggtggtgcgtgtttgtagttttagggaggttgaggtaggagaatcgtgtgaatttaggaagtagtggtagtagtgagtcgagattacgttattgtattttagtttgggtattatagtaagatttcgttttatatatatatataaaaaagtaaagtttgttgatgttgattgggtttagtttgagggtatagaaaaagtttaatatttgggagggtagttttaaagtgatgtttgtgtaagattggttttaaaagaggtgggaggggggcggggatgtttttgtaaaagtggttaaaaagaatgtagttagatgggaggttagcgtttttattttttgtaggtatatttgatatgtttatggatttgatatttaatttagatttaatatggaatggaaggagtgttttaaattttaaagtgaaaaaacgggtatatttattggtttgttgagttatatatatgtgttttagttgttattttttaaaatggaagggtttggttcgatgttttttttatgattgaaagtatattgaaatagaaatgttatatttttagtagttattatttataatttaagtacgttagtgagtattcgggttaggaagatttatagattttatttttatgtatttttttttggagatgttttatgttttagtcgttagtattttagaagtaatttttttttttttggaaaacgtttattataatttttaaagttttcggagtgagtttttttaaaaatgaattgtatttggtcgggcgtgttggtttatgtttgtaattttagtattttgggaggttgaggtaggcggattatttgaggttaggagttcgagattagtttggttaatatggtgaggattttttttattatttattttttgtattaaaagtataaaaattagttaggcgcgatggtgtgcgtttgtaattttagttattcgggaggttgaggtaggcgaatcgtttgaatttaaaggtagaggttttagtgagtcgagattgcgttattgtattttagtttaggtgatagagcgagattttattttaaaaaataaaaattgtgtcggttaggcgtagtggtttatgtttgtaattttagtattttgggaggtcgaggtgggtggattatttgaggttaggagtttaagattagtttggttaatagggtgaaattttatttttattaaaaatataaaaaattagttgggcgtggtggcgggtatttataattttagtaatttgggaggttgaggtagaagaatcggttgaatttaggaggtggatgttgtagtgagttaagatcgtgttattgtattttagtttgaataatgagtgaaattttgttttagtgaataaataaataaatagtatttaagggcgatgaaaatgttttggaattagagttgacggttgtataatattgtaaaggttaaggttgtagtgagttatgattgtattattgtattttagtttgagtaatagagtgagattttgtttttaaaaaaaaaaaaaagaaaaaaaaattaattgtattaatattatattaaagtattttatgagtttatgtgtattttaaagtttattaaattatttattaaatatttgttaatgaagaaaatttagtgttatgggaaatgatatataaaggtagattttgttttggaagtttgaaaatagaaaataaatatgaaatgtttaggtttttaggttagtttatagaggaatatttattttttatggtagttaaattgtagtattgtggattttggttataatgtaaattaatttttatgggaatatgtttttgttataggatttttttttttttttagagttgtagtagtatttgtgattttgatttgtagattttgtagtgattttaaattaggagtaattattattattgtggtatggagtggggaaaaaggtaattggaaaagggtggagatggggaaggatttattaaatgtttttgttgatatagtagagaagttattagatataatattgaatggaggtaataagagagtttttatggttttattaagtttattagtaggtgttttaataagaaatatgtaaaaattattatttgtcggtcgggcgtggtggtttatgtttgtaattttagtattttgggaggtcgaggcgggtggtttattaggttaggagtttaagataagtttggttaagatggtgaaattttatttttattaaaaatataaaaattagttaggcgtggtggtgggcgtttgtaattttagttatttaggaggttgaggtaggagatttatttgaattcgggaggtggaggttgtagtgagtcgagatcgtgttattgtattgtagtttgggcgatagagtaagatttcgtttttaaaaaaaaaaaaaaaaaaaaaaaattgtttgtttgtatattttagtatagagtattgtattttgaaatatttattttgtaattttaagaaaagacgttgagggagttgtggaattagtaaagagaatgtagtgttatttataaacggagtgatgttttgaggagtagaggaattttgagggaggaaagtgtaataggaaaaataattgtaggtgtggaaaaataaatataaatatttttttaattttaattattttttatttttttatattaggttttagaaggtagtaggttatgataataaatttgattttatatggttttgaatttaggattttattttataatatatatatttattgttatttttggtttttaagagtttttgttatttttaaaaagataaaaaaggtattaaaataaaaaattaattatagtattttatagatgtgagagaagtgggtagaaataatacggttttaggttaaaaaaggaaatgaggttattttttgggggagttaatattggcgatttttgagggagcgatttttacgtgaatataaaaaattgtgatagttattattttttttgttaattgatttaaatttatttttttgggaaacgtttttgaggtatttattaggtgtagtttagttagagggagtaaatttatcgggttttcgtttttttttagtattattatttaaagggatgtttgaggggtagggtagcggagtattttagatacggagttaaattcgttttatttcgttggtttacgtttagttcgattaagaattggaggagagaggagtagggcgtggtggcgcgggtttggagttttagttattcgggaggttggggcgggaggatcgtttgaggttgtagtgagtcgtgattgcgttattgtattttagtttgggcgataaagcgagattttgttttaaaaaaaagtgaaaaaaaaaaaaattagaagggagggtattagaggagggttggagtaggtttataggttgggattacggaggagtttagtaatcgagaattatttttgagggtttaatttttttatttttttgatgttttacggggcgagggattagaacggggcgttgagttggttgtaggtaaaagttaatcgattttattttttatttttttattagtcgcgcgttttcgcgtagacgggtgcgcgttggtcgtgggcggtggggatttttttttttcgtttttggttatttaatgtatttgatttagttgtatgaaagttataaaattttttaatattttcgttttgtaaattatttagtatgagagaaattcgaaaggttttttttttttttttttaatttttttttggaaaaaaaaaaatattagaaaacgtaggagtcggataggtagtttcgaagttagtttcgtttttaggttttagcggtttcgtttttttttttttcgttttttttttcgtattttttatttttttttttttttggttgaggttttttttttcgtcgttggttttgttcgaagtttttagagttttttgatttttaaggcgagaattgttgtgttatttttagggatattttttaataaattgcgttattcgagttttttttttttttcgttagtcggttttaaaatattaaggttagttaggattttatatttaacgttcggaagattttgtgaattatatgttaattttgttttagtaacggggtttttttttttttttttttttttttgtttgagtaatttgttttatcggaaaggagaggtagggttgggagagttggaaggtggggaaggtaagagtttgtaggggttatggttttgagttcgaagagtagagtagtagttaggacgggagtttttggttgattatatattcgtggtgtttttaatgttcgtagaggttaatattgtatttatttgtttttttttttagagaataaaataattaggtttaattataaaattaaaagtaaataaaatttagttaggttgatgagttaatgtgggaaggagtataaaatgagtgttagaattcgtgggtttaattatcggttttgtaatttgttatttgggtaattagattaagttattgaatttttttgatttttggtgttgtttttgaaaatgaaaaggtttgattgaatggtttgtgttcgtagattttaggatagtttttatattaagttgaaagtagttgtagttttaataatggtttttaatttttaaatatttaaataagaatgattacgagttatattcgagagtatgggatttttaataaaaggagggagaagattatattttttttgattatgtagggaaaaaaaatttttttattcgagataggatttttgttttttaggttggaatgtagtggcgtgattatagtttattgtagttttgattttttgtgtttaagcgatttttttgttttagttttttaagtagttgggattataggtatttgttattacgtttagttaatttgtaaagtttttagtagagatggtgttttattatgttgtttaggttgattttggatttttgagtttaagtgtttgttttggttttttaaagtattgggattatcgatttgagttattatacgtagtttagttattgttaattatgttttagagatgaatacgtcgaaatttgtgttatttagttaatgtataagtatttttttgttgaaaagaaaaatagttttattaaagaagtagagcgtagatgtaaatttaggattttttttttttagattttttttttttatgttgttagaaatggttagggttttttttgttattgaagtatttgttatttatttagttaagaatgtttgtttttagattttatattaattaatttttttgtttttatttaagtttatttggataaatttaaaattataatagtttttttttttaatttattatttttttgagatagagttttgttttgttatttagattggagtgtagtggtgcgattttagtttattgtaatttttattttttaggtttaagtgatttttttgttttagtttttgagtagttgggattatagatgtgtattattacgttcggttaatttttgtgtttttaggagagaaggggttttgttatgtttgtcgggttggttttgaatttttgattttaggtgatttatttatttcggttttttaaagtgttgggattatatgtatgagttatcgcgttcggtttatattattttttaaaatgaataaaattaagaaaattattgtttgaggaattataaaaaggagagggagaaggaaggaaaagattttgtagcgttagtttgaagaaggttgttttattttatattgttgtagtaattatgtttttggtattttttttttagtttttttgtttttttgaaagtatttaatttggtttttattttggggattttgagttttgatttttttaaatatagaatttaataaaaatttaattttgaaattaattatattaaagttttgaaaaattttttggggtttttatatatttattttagatagtaattaaatttgtgattggatttttgttttgggaagtatttagtttgaaaggaaagaaaaggtcggcgtggtgttttatgtttgtaattttagtattttgggcggtttagacgggcggattatttgaggttaggagttcgagattagattggttaatatgacgaaattttttttttattaaaaatataaaaattagttaggcgtggtggtgtgtatttgtaattttagttatttaggaggttgaggtaggagaatcgtttgaatttgggaggtggaggttgtagtgagttaagattgtgttattgtattttagtttgggcgatagagtaagattttgttttaaaaaaaaaaaaaagaaaaaaaaaagaaaatttaggtgattttttttttgttaggaaatggataaggaatatgtatgtgtgggtttttagtttagtttatagaggttttatttaaaagttaggttaattatagtattgtagattttgattagtgtgattgattgaagaaaaatagtatttatattggatttttttgttatttagagagtatttaagatttggggttttaatattatatttatttgttaggtagttgagatagtgatgttttttgttttatgttaatagagaggtttttttttttttttttttattttttattttttattttttatgttttttagtagaattagagaagtattttatttttgagaaggagtttcgtttttgttgtttaggttggagtgtagtggcgcgatttcggtttatcgtaattttcgttttttgggtttaaatgatttttttgttttagatttttaagtagttgggattataggtatgcgttattatgtttaggtaattttttttttttttttttttttggtatttttagtagagatcggttttttttatgttggttaggttggtttcgaatttttgattttaggtgatttgttgtttcggttttttaaagtgttgggattataggtgtgagttattgtgttggttttttaaattgtggatttggaaggagggaaggaatgaatttagatttgttagtagtagtagttgatggtgaggaagtttttagagggaggggtgaggttaagggtttttggaagtgttgatatattgtgtagttaagatgaatatagtttgggagaatttttagttagatattttatagagaaatgtttgggaaaatttttgaagtttgatcggtttgattagtttagagaggtgatttattagggagttaaagttgaatgtgaaagttattatttatttgtatatatagatatatatatattgttaaagtaatttatttgtaatatgagtttagattagtgaattataaataaatgaatatttttaaattttaggaagaggtgttttgatagtggataggtgtgtgtgtgtaggtgtgtatatgaaaagtgttaattgagtaaagtgtttaaaaataggattatttttttattagtaattttttttttttatttgtgtttaaggaatatcgttatggtaatgaggttattttttttttttttttttttttttttttgtggtaggttgtaaatatagtattattgttttaatttttttatattttttttttagacgtttaataaagggttttgtatttatattaagaatgaaggaaaaaaataaagggaaagtaaattattaaatgtaatcgtatttaaaataggaggaaggagaattcgtaggaagttggaatttaggataaaaatttagatatatttagtttggttaatatggcgaaattttgtttttattaaaaatataaaaattagttcggcgtggtggtatattttgtaattttagttattggggaggttgaggtagtagaattgtttgaattttaggggtagaggttgtaatgagtagagattttattattgtattttagtttgggcgatagagtgagatttagttttaaaataaataaataaaaataataggtcgggaatggtggtttacgtttgtaattttagtattttgggagttcgaggtgggcggattacgaggttaggagttcgagattagtttgattaatatgggcggattacgaggttaggagttcgagattagtttgattaatatggggaaattttgtttttattaaaaatataaaaattagttaggcgtggtggcgtacgtttgtaattttagttatttaggaggttgaggtaggagaattgtttaaattcgggaggcggaggttgtagtgagtcgagattacgttattgtattttagtttgggcgatagagcgagattgttttaaaacgaaaataataaatttaagatatataatttgaggtgttaagaggagttagtaattagaatttgggttttaattttttttgttttttagtattattttatatagtttgtttaaagagggttatttgttaaatagttgtagtatgtgatgttaaagagagttaaatatttttcgtattttttttttagggttattattttgttaaatttgatttaaaaacggtaatagtttaggggttttagggatagatagaaaattttattcgggattgtgaggttttatttttatatattgtttaggagtgaattaggaattgagaaagtaggaaggaggtgttttagattttaagttaggaatggggagggaaatggaggaattttaaatgttttaaggacggtttatatattaaggaaaatttttttttaatttttggttgtagttgaggggagcggttgagggcggggataggggtgcggcggatttattgtttttattattcgattagcgtttttttttttttttggatgggtgtttttgttttgttaagaattgtttgtttatataattgttttttttgtgaaaatttaaaggtttttatttttagttgttttatttttgtaggttaaagattatgttaaaaattatattgtattattttttttttttttttttttattaagacggaaaaaatattcgggagagtcggttcgttttttaggtagattaggttattaggtgtttcggagaaaggatttaaggttgtttcgttttttatagatatagtttaattagagttttttaggtatatcgatgtatcgtttttttcgagaaataaggtaattttcgggttttggttgtttttaaagttattcgattaatttcgtatcgtttagagcgggttttttttgttaattatttattgaagggtaggcggttagtatcgttatggagattaatattttttttattattatttttttttttttttagggtttttgttttttttagtgaattttagaagattttggagagttttgagtagagggcggtattttgttttttgattggtttaaggaaggttggggggtaggacgggaggcgaaatttttggaatattttcgatttggtagttttatcgagtttggtgattggtttagaaggggaaaggcgggtttttacgacgatttataaaagtcgaggggcgcgcggttcggaaaacggttagtttgaggagttgttgcgagggttcgtttcgtttttcgagagtgattttcgcggttttaaggttttttagagcgaatttgtgcggttgtaggtatcggcgtgttgagttttcggcgtttcgaaggattgagtttttgtcgcggatttcgttcgtcgtttttagtttttagttttagagcggagtttatagagtagggtatcggtatggttaaagtcgcggcgatcggtatcgatttgggtattatttatttttgcgtgggggtgttttaatacggtaaggtggagattatcgttaacgattagggtaatcgtattatttttagttacgtggtttttacggatatcgagcggtttatcggggatgcggttaagaattaggtggcgttgaattcgtagaatatcgtgtttgacgcgaagcggttgatcggtcgtaagttcggcgattcggtggtgtagtcggatatgaagtattggtttttttaggtgattaacgacggagataagtttaaggtgtaggtgagttataagggggagattaaggtattttatttcgaggagatttcgtttatggtgttgattaagatgaaggagatcgtcgaggcgtatttgggttattcggtgattaacgcggtgattatcgtgtcggtttattttaacgattcgtagcgttaggttattaaggatgcgggtgtgatcgcggggtttaacgtgttgcggattattaacgagtttacggtcgtcgttatcgtttacggtttggatagaacgggtaagggggagcgtaacgtgtttatttttgatttgggcgggggtattttcgacgtgtttattttgacgatcgacgacggtattttcgaggtgaaggttacggtcggggatatttatttgggtggggaggattttgataataggttggtgaattatttcgtggaggagtttaagagaaaatataagaaggatattagttagaataagcgagtcgtgaggcggttgcgtatcgtttgcgagagggttaagaggattttgtcgtttagtatttaggttagtttggagatcgattttttgtttgagggtatcgatttttatacgtttattattagggcgaggttcgaggagttgtgtttcgatttgtttcgaagtattttggagttcgtggagaaggttttgcgcgacgttaagttggataaggtttagatttacgatttggttttggtcgggggttttattcgtatttttaaggtgtagaagttgttgtaggatttttttaacgggcgcgatttgaataagagtattaatttcgacgaggttgtggtttacggggcggcggtgtaggcggttattttgatgggggataagttcgagaacgtgtaggatttgttgttgttggacgtggtttttttgtcgttggggttggagacggtcggaggcgtgatgattgttttgattaagcgtaattttattatttttattaagtagacgtagatttttattatttatttcgataattaattcggggtgttgatttaggtgtacgagggcgagagggttatgacgaaagataataatttgttggggcgtttcgagttgagcggtattttttcggtttttaggggcgtgttttagatcgaggtgattttcgatatcgatgttaacggtattttgaacgttacggttacggataagagtatcggtaaggttagtaagattattattattaacgataagggtcgtttgagtaaggaggagatcgagcgtatggtgtaggaggcggagaagtataaagcggaggacgaggtgtagcgcgagagggtgttagttaagaacgttttggagttttacgtttttaatatgaagagcgtcgtggaggatgaggggtttaagggtaagattagcgaggcggataagaagaaggttttggataagtgttaagaggttatttcgtggttggacgttaatattttggtcgagaaggacgagtttgagtataagaggaaggagttggagtaggtgtgtaattttattattagcggattgtattagggtgtcggtggtttcgggtttgggggtttcggggtttagggttttaagggagggtttgggttaggttttattattgaggaggtggattaggggtttttgttttttagtatgtttgtttttgaggtggattgttgggatttaaggattttgttgttgtttttttatgttatttttgttttagttttttgttgttttatttttttgtaaagttaagttgtaatttgatggtaattagttggttttattatttttgtagtataatcgatatgtttattagaattttttgtatttaatgttgatattgtaagggtgtttcgttttttttaaatgaattaatattgttattttttgtacgagtttgtttttttttttttttttttttttttttgtttggcgaaaatattataaaggttgggaatgtatgtttttataatttgtttatttaaatatgaaaaataaaatgttaaatttttttttgtttgttaatatgtgaagataatggatatttgcggagggatagtgtttgaatattatttatttttatagtttgaaaagaatagtattgttgaagagttatacgtgtaggagttagagttatatatatttttgtttgggtttaattgtgggttttaagagaaattgtaggtgttcgttttgattagagtggggtttgttttagggaaaagtcggatggtagttgtaaaacggtattggaggggtggttgaggtgggtttattggggcggggaggggaggggtggtgttgagatgggattatggtggtttttttttttttttttatttagtgagcggagtttataaaaaaatgttgattttttttttttttttttttgagacggagttttatttttatttttgtcgtttaggttggagtgtagtggcgtaattttagtttacggtaattttcgtttttcgggtttaagcgatttttttgttttagttttttgagtaattgggattataggcgtttgttattacgtttggttaattttttgtatttttggtagagatagcgttttatcgtgttagttaggatggttttaattttttgatttcggtttatatttatttatatgtggaatttaaatagtagaatttagaagtagagaagtggtggttattaagggttgtgggatgggggaatggggagacgtgtaagggaaataaagttttagttaggagaaataaattgtattttttttttttttgaaacgggatattgttttgttatttaggttggagtatagtagagtttattgtagttttaaatttttgggtttaagtaatttttttattttagttttttgagtattgggtttataggtatgtgttattatgtttagttaattttttgtattttgtagagacgaagttttgttgtgttgtttaggttggtttcgaattttttagtttaagcgatttttttgtttagtttttttaaagtgttgggattataggcgtgagttattgtgttttgttagtttttgtgtttttttttgggggggtggtgggtggagggtatatattgtatggtatggtgaaaatagttaatagtgtattgtatattttaaaattttaaatgtttttgttataaaaatatttgaggtgatatgttaattagtttgatttaattattttatattgtgttaataattattttgtattaatatatgtaattaaagtttgttaatttataaaaagaatttaaaaattaaataaaatgggttaggtgcgatggtttatgtttataattttagaatttagggagggtgaggtgggcggattatttgaggttcggagtttaaaattagtttggttaatatagcgaaaatttatttttataaaaaataatagaattagttggtcgggcgtgggggtttacgtttgtaattttagtattttgggagatcgaggtgggacggttggattatttaaggttaggagttttagattagtttggttaatatggtgaaattttgtttttattaggtgggtacggtggggtatgtttataattttagttatatggaaggttgaggaaggagaattatttgaattttggaggcggaggttgtagtgagttgagattgcgttattgtattttattttgggtgatagagtaatattttattttaaaaaaatataaataaaacggttaaagttttgtgttgtatttttgtgtaaatttttattttttagggttttaaaatgttttaaatttttaaaacgttttaaggattatataatattggaaattttttttgaaagtgtataaaagaaaaggaatatagtaagtttttttggttttggggttaagttttttttttttttttttttttttgagatagagttttatttttgttgtttaggttggagtatagtggagtaatttcggtttattgtaatttttattttttaggtttaaacgatttttttgttttagttttttaagtagttgggattataggtatcggttattatgtttagttaattttttgtatttttagtatagacgaggttttcgttatgttgggtaggttggtttcgaatttttgattttaggtgatttgtttgttttggttttttaaagtgttgggattataggcgtgagttattatgttcggtttttgggttaatttttaaaggtttgttttattaatgaaagagatgaattaggttaggcgcggtggtttatatttataattttagtattttgggaggtcgaggcgggcggattatttgaggtttggagttcgagattagtttgattaatatggagaaattttatttttattaaaaatataaaattagtcgggtgtggtggcgtatgtttgtaattttagttattttggaggttgaggtaggagaatggtttgaatttgggaggcggaggttgttgtgagtcgagatcgcgttattgtattttagtttgggtaataagagcgaaattttgttttaaaaaaaaaaaaaaaaaaaaaaagaggaattaaagtttttgattatagtatttagtaaaggtagtttaattgttaaaatagtaggaattagggttttttgtatatatatatatatttttttaaggtagggttttattttgttgtttaggttagagtgtagtggtatgattacggtttatggtagtttcgattttttgggtttaattgatttttagttttttgattagttgggattatacgtgtatgttattatttatagttaattttttttttatatatttgttaggtagtagagggaataaatattttagttttgagttatggttttttattttaatggaataataaaacgattaagggatgttaaaaaaatatagatgttaggttttttttaggttaatttagaattttaaagagggtagtgtagatatttaaagttgtttaggtgtttgtaatttgtagttaatgtggagaaaattattgaattgggttggttacggtggtttacgtttgtaattttagtattttgggaggtcgaggtgggaggattattgaggtttattagtttaaaattagtttgggttaatatggtgaaaatttttgtttttattaaaaatatataaaattaattgggtgtggtggtagatgtttgtaattttagttatttaggaggttgaggtaagagaattatttgaattcgggaggtagaggttgtagtaagtcgagattatgttattgtattttaatttgggtaatagagtaagattttattttaaaaaaaaaaaaaaagaaaaagaaaaaaaaaaaaaaaagaagaggttaggttcggtggtttatatttataattttggtattttgtggaggtttaggtaggtaaattatttgaagttaggagttcgagattagtttggtttatatggtgaaattttgattttattaaaaatataaaaattagttaggtatggttgtgtgtatttgtaatttttgttatttcggaggttgaggtaggaaaatcgtttgaatcgaggaagcggaggttgtagtgagtcgagatttcgttattgttttttagtttgggtaatagagttagatttcgttttaaaaaagaaaaagatattaatatatataatatatattattaaatattatacgcgtttataaatgggggcgataggaaagggtttagaaaggatttgaaatgatttatgagttttaataatttttttttttttgagatagagtttcgttttgtcgtttaggttggagtgtagtggcgtaatttcggtttattgtaagttcggcgttttgggtttacgttatttttttgttttagtttttcgagtagttgggattataggcgtcgttattatattttgttaatttttttttagtagagacggggttttatcgtgttagttaggatggtttcgattttttgatttcgtgatttatttgtttcggttttttaaagtgttgggattataggcgtgagttatcgcgttcggtttaatttttaaataaatagagacgggggttgggtgttattatttgtttaggttggtttcgaatttcgggttttaaatgattttttgtttgggtttgtttaaagtgttgagattataggcgtgatttattacgttcgatttgttttttgggtttttggtttttgttttgttttgtttaattgaaggttagggtgtttgatagtttgcgggatcgaattgggaggtaaatttagatttcgttgggggaacggagtgcgaagtgttagggtagttggacgttaaattggcgtagttgcgcgcgttcgcgcgcgcgcgggaagagttttagggttattaacggattatgggttgttgggaaacggtttaggagtagtattcggttggcgttggtcggtcggcgtcggggattttttttcgtttggttagatagatttttgttttttgttttttaaaatttagaaagtattttcgaatatttgtttagaggagtgtgaaatatatttttttggttttttttttattttgttttatttttgtgtggataaataatggggaaaatgtcgcgcgtttagttaggtagataagaaaataattatattcgttaggtttttaattcggcgtcgttataaatggtttcggtttcgttattttagttttttttgcgaagtgggttcgtgggttggtagtatgagagttgtaatggttcgattgttgagtgagggggagtaggggattttaacggtttgcgttgtttttgcgtagtagtcggcgggcggttacgtcgcggtttggttggggtaggagagggcggtttttagtgtagttgggtgaattatcgttgtatattggagtttttggtgtttttgtttggaattgatttagttcgtggtagggggaattcggttagcggttttatagtttttgttgatttaaaataattgtgagtggggttgggcgagtgattgtaaaatgggggtggcggtcgttcggggataggaagggagtgatgatgattttaggtaattttgagtgtgtcgttgatgttattatcgtagcgttttgatcgttttttcggtttagtattttttaggtttaacgagtttatggttaagatttttaattttttgttttgttttattttttcgttaggagttgtaagacgtttatcgtcgtgttatttttgagtaaaggtgagtattaggtgcgagagttttttgaatgttttttcggaaagttttgtttttaagtaagttttcgtttatgggtattatgcgtttttttgttttttttttttttttttttttgagatagtttcgttttgttatttaggttgaagtgcggtggtacgattttattgtaatttgcgttttttgggattaagcgatttttttgttttagtttttcgattagttgggattataggcgtatgttattaagtttggttaattttttgtattttttaatagataaggggttttattgtgttagttaggatggtttcgatttgttgatttcgtgattcgtttttttcggttttttaaagtgttgggattataggcgtgagttatcgcgttcggttttttttttttttttttttttaagatagtttttttgttattttggttggaatgtagtggtaagaatataatttagtgcggtttttaattttcgggtttaatcgatttttttattttagttaatttttttttttttttttttttttttgagatggagttttgattttgttgttcgggttggtaatggtacgatttttttgtaatttttgtttttcgggtttaatcgattgttttgttttagtttgtcgattagttgggattataggttcgcgttattatattcggttaatttttttgtttttagtagaaggggttttattatgttggttaggatggtttttattttttgatttcgtgagtcgttgtgttcggttatttttttttttttgagttataatttatgtattataggtggtgatttttatttgtttgtttttgttattttgtttttgagatagggcgtaatgttaggatttttttgtaatatttatcgttagggtttaagtggtttttttattttagttttttgggattgtaggtacgtgttattattacgtttggttaatttttagtttttttatagaagcgggtttttgttatgttgtttaggttggtttttatttttgggtttaagtagtttttttgttttagttttttaaagtgttggaattataggggtgagttgttgcgtttggtgttggtgattttttagagattattttttggtttatattattttttttgtgattatttttatttttttggggggcggggggatagttttattttttttagtttatattattttttttgtgattattttatttttatttttttagggggcggggggatatgagttttatttatgttggttaggttggttttaaatttttgattttagttgatttacgtttttcggttttttaaagtgtcgggattataggcgtgagttattttgttcggtttgtatttttacgttttaataaattttcgtatttttgttaaaggttgggtaatttgatttttttttttatttttattgtaaaataggagtatattggggttttttagtggagttgttttttgttgttttaaattattttttatttttttttttttaacgtttatttttggatttatttgttagattaatatatattgggattgttgtgttttttttgagtgtattagatttttttttagaagagttttttttgatttagatttttttaattgggaatgatgattttatagattagagttttcgatgttggttatgatgttaaaattaagttttgatttatttagggaattggatatttgggtttttagaagggttaatgggagggttataattttgtttatttttaaattgttttgtttttattttgttagaatgaattttggaagtttagttagggataatgtatttttatagagattttgtattaatttgagtgaaggtttaaggtttggaattttttttttatggagagaagttttgtatggttgttatgtttagatagtgatttttgtaatttgatttttaggttgggagaggtggagagttatgtttgttttttttttttgttatggtgagtattttttgttttggtttttagtgggagtggtaatgatgatttggttggataagagtttttgagtttttttttgaggatttttgaatttatttgatttatttttattttgtcggtaattttttgtaatttatgtttttatggttagttatttatatgatgaggtttaattggttatggttttgtaggatgtataggaagtatggtgttggtatttgtttagtttttggtgggggttttaggaaattatattgtataaggtatagagggaagtagggatgtagtatggttagagtagtagtaaaggtagggaggtgttatatatttttaataaattgatttttagagaattgattgttatgagtatagtattaaggaggatggtgtttaagttatttatgaggaatttattttagtgatttattataatttaatatgagatttggtggggagatagatttaaattgtattatagggttttattttgtgtataggttggtttttaatttttgttttagtgagttattgtgttttattttaatatgttttgtgtgttttttgagattgttttgttttgttatttaggttggagtgtagtggtatatttttggtttattgtagtttttgttttttaggtttaagtaattttgttttagttttttaagtagttgggattataggtatgcgttattagtttcggttaatttttgtatttttagtagagggttttattatgttggtcgggttggttttgaatttttgattaagagatttgtttattttgattttttaaagtgtttagattataggtattagttatcgagtttagttcgtaatatgtatttttatttattttttgtttgagatggagttttattttgtcgtttaggttggagtgtagtggtatatttttagtttattgtaattttagtttttcgagtatttgggattataggtatgcgttattatgtttagttaattttgtatttttagtagagatgggagtttttattatgttggttttgaatttttgattttaggtgatttgttcgttttagttttttaaagtgttgggattataggtgtgagttatagtatttgataattttattttattttttgagatagttttgttttgttatttaggttggagtgtagtggtgtagttatagtttattgtagttttaattttttgggtggaagtttattttttattttatttttggagtagttaatgatttataggtatgtattattattttcggttaatttttttttttttaaatttgaggatgggtgtggtggtttatgtttgtaattttagttttttgggaggttaaggtgggtggattatttgaggttaggagttgaagattagtttgattaatatcgtgaaattttgtttattaaaaatataaaaattagttgggtatgggtggcgggcgtttgtaattttagttatttgggaggttgaggtagaagaatcgtttgaatttgggaggtggaggttgtagtgagttgatatggcgttattgtattgcgttattgtattttattttgggtaatagagtaagattttattttaaaaaaaaaaagttgtagataatggggttttattatggtgtttaagttggtttgaaatttttgggtttaagtgattgttttgttttggttttcgaatatttttgttttggttttttaaagtgttggaattgataggcgtgagttgttatgtttagttttagtttttattgtagatttagggggtatatgtgtagttttgttatttgggtttattgtatgatgttgaggtttggggtaggattatttttattatttaggtagtgggtatagtatttaatagttattaaatttttgttttattttttttttttagtgtttgttgttatttttatgtttatgtatatttaatatttagtttttatttataagtaagaatatatggtatttggttttttgttttgtattgatttattgaggattatggtttgtggttgtatttatgttgttgtaaaggatatgaaatcgtttttttattggtgtattttatatggttttaatgttttttttattattttttaggaatttgttgatataatatttttcgtttggtgttgggtatattttaagaatttataatttttttgtattattttgtgtgagtagttgttattttattgggggaaaaatgtttgaaaattagggggtattttaagtagatagtttttattttttatatttgttttatatataagtatttgtttttattaaaataattttaataaagtattttaaagtaaagaagacgtggtttggttttagaataatggtataaaaagattaagggggttgggcgtaagttgtttatgtttataattttagtattttgggaggtcgaggtgggtggattataaggttaggagattgagattattttggttaatatggtgaaattttgtttttattaaaataaaggataaaaattagttgggtgtggtgatatatatttgtaattttaattattcgggaggttgaggtaggagaatggttttgaattagggagtttaaggttgtagtgagtcgagatcgtgttattgtatttttagtttggcgataggtttcgttttaaaaaaaaagaaagatgaagtttcgtgagttagttaatgttgagttaggtttaatttttaagtttaatattagagatttttggttgggtgatatagtattatgtataatatattagatttttgataattatttgagatggtttttttggtaggggaggaggtggagtttcgtttttgttgtttatgttggagtgtaatggtaaaatttcgttttattgtaatttttgtattttgagtttaagtgatttttttgttttatagttttttgagtagttgggattataggcgtttggtattttttttagttattttttgtatttttagtagagataaggttttattatgttggttaggttggtttcgaatttttgattttaggtgatttatttattttaagttattcgtttgttttagttttttaaagtgttgggattataggtgtgagttattgtgtttggtcgaatttgagttttttttaatgattgtaaagtgtttacggttatttaattagttatttttttttttttgagatagttgtattttgttatttgggttggaatatagtggcgtagtttgggtttattgtagttttttttcgggtttaagtgattttcgtgttttagcgtttttagtagttggggttatagttgtatattttatttttgtattttttgaagagataggggttttattatattggttagggtggtttcgaatttttgattttaaatgatgtgtttggttagaatattattaataattttgaaataaatttgtttgatttaattttttttttttttttttttatttggagaattaattgggtatattattttttggttttttttaatagttttattgagtgtattgttaaataatattattttaattttgcgtattttttgaattttgtaaaaatggaatgatttattagatacgagataatattttttttttttggggggatggagttttgtattgtcgtttaggttagagtgtagtggcgtgatttcgatttatattgtaatttttgttttttaggtttattttattattttgtttgggttttttaaattattgggattataggtgttcgttattatgtttcgttaattttttgtatttttagtagagatgggggttttattatgttggttaggttggtttcgaattttcgattttgtgatttgtttattttggatttttaaagtgttggtattataaatagttattatgttggtttattttttattttttaaaaagaataaatttttatgtgttttattgtaattttttgtttttttggggggcgggggggatagagttttgttttgtcgttaggttggagtgtagtggcgcgatagtttattgtaatttttattttttaggtttaagcgatttttttttttttagtttttcgagtagttgggattataggcgcgtattattatgtttagttaatttttgtatttttattagagacggggttttattatattggttagggtggtttttaatttttagttttatcgttcgttcgtttcggttttttgaaatgttgggattataggcgtgagttattacgtttgatatttatttattttatttatttttgagatggagtttcgttttgtcgtttaggtagtatgtagtggcgcgatttcggtttattgtaagttttgttttttaggtttaagttatttttttgttttagttttcggagtagttgggattataggtgttcggttaatttttttgtatttttagtagagacgggttttattgtgttagttaggatggttttggattttttgatttcgtgattcgttcgttttggttttttaaagtgtagggattataggcgtgagttatcgcgtttagttttttttgttttttgagatatagttttgtttttgttttttaggttggagtgtagtggtattattttggtttattataatttttgttttttgggtttaagcgatttttttgttttagtttgttaagtagttgggattatatgttattacgttcggttaattttgtatttttattagagatggggtttttttatgttggtcgggttggtttttcgaatttaggtgattcgttagttttagtttttgaaagtgaaagtgttgtgattttaggttagagttattatatttggtttgtaatttttgttgttgtttatgtatttttttgtagtttatttgtagtttatttttttatatatatttgtggatataaaaaattttagggtttggtatggtggtttatgttcgtaatcgtagttgaggcggatagattatttgaggttaggggttagggattagtttggttaatatggtgaaattttatttttattaaaaaaaatataaaaaagggttaggtttacgtttgtaattttagtattttaggaggtcgaggcgggtagattacgaggttaggagattaagattattttgtttaatacggtgaaatttcgtttttattaaaaatataaaaattagtcgggcgtggtggcgggcgtttgtagttttagtttttcgggaggttgaggtaggagaatggcgtgaattcgggaggtggagtttgtagtgagttaagatttcgttattgtattttagtttgcgcgatagagtgagattttattttaattagggttaggtatggtggtttacgtttgtaattttagtattttgggaggtcgaggtaggtggattatttaaggttaggagttcgagattagtttggttaatatggtaaaattttgtttttattaaaaatataaaaataaattagttaggtgtggtggtatacgtttgtaattttagcgattcgggaggttgacgtaggagaattatttgaatttggtaggcggaggttgtagtgagttgagattatgttattatgttttagtttgggtaataagaatgaaattatattttaaaatatatatatatatatatatagttaatcgagtatggtggtatgcgtttgtaagtttagttatttgggaggttgaggtatgagaatcgtttgaatttgagaggtggaggttgtagtgaattaagatggtattattgtattttagtttgggtgatagagtgagattgttttaaaaagatttaggagttagattgaatatttattgttaggttaattttggttaagttttttagtgatttttataataatttttttgtttgtaaatagataatagagtttttatttattttttttttttttttttttttagtagtagagatagggttttattatgttggttaggttggttttaaatttttgattttaggtgatttatttattttttaaagtgttgggattataggtgtgagttattgtatcgggtttatttttttttttttttgagatagggtgttattgttgtttaggttcgagtatagtggtaagattatagtttattatagttttgattttttgggtttaagtgatttttttattttagtttttgaagtagttggaattataggtgttttattatgtttagttaatttttttttttttttgaaagagaattttgttttgtcgtttaagttggagtgtagtggtgtaatttcggtttattgtaagttttattttttgggtttatattatttttttgttttagtttttcgattagttgggattataggtatttattattacggttagttaattttttgtatttttagtaaagatggggttttatcgtgttagttaggatggtttcgattttttgatttcgtgatttatttgttttggttttttaaagtgttgggattataggcgtgagttatcgtatttgattttttttttttttttttgagacggagttttgttttgttatttaggttggagtgtagtggcgcgattttggtttattgtaagttttgttttttaggtttacgttatttttttgttttagtttttcgagtagtaggaattataggtgttagttattacgtttggttaatttttttgtattttaggtagagacgaggttttatcgtgttagttaggatggtttcgattttttgattttatgatttatttgtttcggttttttaaagtgttgggattataggtgagttatcgcgtttagttatgtttagttaatttttaaattttttatatagtgaaggttttattatattgtttgattggtgtttaatttttgaaattaaatgatttatttgttttggtttttttaaatgttgagattataagtttgagttattaagttcggtttatttcgtttttaataaaaaagaagtatagtgcggtggtttatatttgtaattttagtattgtgggaggttatggtgggtagattttttgaatttaggagtttgagattagtttgtttgggtaatacggtgaaatttagtttttataaaaaattttaaaaattagtcggttgtgatggtatgtcgtggtttagttatttgggaggttgagatgggagaattgtttgagttttggaagttgaggttgtagtgagttatgattgtgttattgtattttaatttgggtaatagagtgagttttatttttaaataaataaatgaagaggtagagttatgttttgttgtttaggtttgatttgaatttttgggttgaagtgattttttcgttttagtttttttagtagttggggtaataggtatatgttattatatttagttttgttggttttattttttgtttttaagggttttttttgtatttttttgttttttgtatggtttaagtttttttttgtgtggtgggtgttaattttaggtttggggtataagattgagttatagttatggtaagatggttacgtgaatttttttttttatatagtggtgatgttgaaagattttaattttaaaatgttattttttttatttttttttttttttttttgagacggagtttcgttttgtcgtttaggttggagtgtagtggcgcgatttcggtttattgtaagtttcgtttttcgggtttacgttatttttttgttttagtttttcgattagttgggaatataggcgtttattattatattcggttaattttttgtatatttagtagagacggggttttatcgtgttagttaggatggtttcgattttttgatttcgtgatttattcgttttggttttttaaagtgttgggattataggcgtgagttatcgtcggtttattttttttatttttttaggttttatttttatattaggagtggagtaattttagtaataaatagtttttttttttatttttttaggttgaattttttagtttgtagttattttaatagcggttagtttgttattttagttattgtaggtagtgagttttttaaggtttggttttagtttgtttttttatagaaatgggagataagaatttttggaatttttatttattggttagtgtgttggttttttaggtgatatttttatttgttagttgtttaggttagatttttggaatttgtttgattgtttttttgtttttatatgttatatttaatttgttagtaaattatattgtttgtattttagaaatgatacgaggatttgtgttttatatttttattgttgttttattttggtgggagttattattggtttttatttagataattgtaattgttttttatttggttttttggtttttatttttgttcgttataggttttttttatatagtagttagaaggttttttttaaattaggagttaggttatgtttttttttttttgaagattttgtaatagttgttattttatttagagtaaaagtttttattttataagggttatttaataaggtttttttagtttagttttgttaattttttgattttattttttatatttgaggttaggggttggggattagtttggttaatatggtgaaattttatttttattttgttttagttatgttatagaaatttaggagttgtttggagtttttttgttagtgttcgaggagtaaaatttttatttattggttagagttatagtcgtaggttttgtggggtatatttaaatttgtattaatagaatttatggatgaaatttgtattttttgggttgtgaggaaattttagagtttagaaataattttaaaaatttttggggttgggtgtagtgttttatgtttgtaattttagcgttttgggaggtcgaagtaggtggattatttgaggttaggagtttgagattaatttggttaatatggcgaaattttgtttttattaaaaatataaaaattagttaagtgtggtggtgtatatttgtaattttagatattttgatggttgaggtatgagaattgtttgaatttaggaggtggaggttgtagtgagttaagattgaatttttgtattttagtttgggtaaaagtatgagattttgttttaaaaaaaataaaattaataattagtggtacgtaatgtttatatattagttgtatgtaatattaatatatgtttatatattggtagtatgtaagtatatgtaatgtgtttggttttttattttttatttttgtatgtttgaaatattttttagtattttaaaaatatagtttgggggttgggtatggtgatttatgtttgtaattttagtattttgggaggttaaggtgggaggattatttgagtttaggagttcgagattagtttgggtaatattgtaagatattatttttaaaaataaaaattaaaaaaaataataaagatatataataaataagataaatagtagattaattaaatgaagaattagtgagttggagggagaaataatttataatgtggagtagagaaattagaggtgatatgaaaaggaagttttgaaatatgaaggatggaatgagatattttaattttagagttgttttgtttttgtttttgagatgggagttttgttttgttgtttaggttggagtgtagtggtatgattttagtttattgtaatttacgttttttaggtttaagcgatgtttttgatttagttttttgagtagttgggattataggtggtgttattacgtttggataatttttgtatttttagtagagataaggttttatcgtgttggttaggttggttttgaatttttgattttgtgatttatttgtttcgtttttttaaagtgttgggattataggcgtgagttattgtatttagtttattttgtttgttatatggatttgttatttgtagttagaatagttatagagttattatgagttttgttgtttaatggcgtataggggtatttggtttttagtattttaggtttatttgttagtttgttgattgtagtattttttttttattagtattttatttttttatgattttttttgggggggagtggggtggatagggttttattgtgttgtttaggttgtagtgtattggagttattttggtttattgtagtttttgttttttgagttattaagtttggttgttttttttttttttttttttaatttttgtgttattttttaaagattatataaagaaataaattattttaagggttaaagtatttgttgatttttgaaatgttaaattttattgtttttagttaggtgaattttaggtggaagtgggttatattttaggttggttgttgtttgttttaaattttaaagaatgtagtgaagataaaggtgttagttgataatttttagttatttattgatggtagataataaattgggaagggggagttttttttaaagggttttgtagtattagttggtattattttgaaatagggagtaagttttattttttagtgttatttagggaatatttgtgttttatattgggttgattgtttttaaaagaggtagaggaattgttataaaataaaaaaaaaaatttttaaaagttttggttgggcgtggtggttaatgtttgtaattttagtattttgggaggttaaggtaggaggattgttggagtgtaggagtttgaggttagtttgggcggagattatttttttataaaattaaaaaattaggtgtatttttaagtatttgtagttttagttatttgggaggttgagatggaaggattatttgagtttagaaggtcgaggttatagagttatgattgttttatttattgtttttcggtttgtgcgatagattaagattttgtatttaaaaggaagaaaaaagaaaattggtaaaaataatgatattagtatttgtatgtatttatatttggtaggattattttaaagtatattaaagagattatgatattttatttttttgtatttgagtatgtatttttaaaaaataaggatgtttatttgtatatttataatattattatatttgagaaaagtaaatttaattttttaatagtatttaatatttaggttagttattatggtttatatttgtagttttagtattttggaaggtcgaggttggtggattgtttgagtttaggagtttaagattagtttgggtaatatgtcgagatttcgtgtttttaaaaaatataaaaattagtaggtgtggtggtatatatttgtggttttaattatttatggggttgaggtgggaggattgtttgagtttgggaggttaaggttgaagtgagttatgattgtagtattgtattttaggttgggtgatagagtgagattttgtttttaaaagaagtgtgttgttgagtatagtggtttacggttgtaattttagtattttgggaggcggaggtaggtggattatttgaggttaggagtttgagattagtttggttaatatggagaaattttatcgttattaaaaatataaaaattagtcgggtgtggtggtgaatatttgtaattttagttatttttgagaatttgaggtaggagaattatttgaatttgggagtcggaggttgtagtgagtcgagattatgttattgtattttagtttgggtgatagagcgagattttgttttaaaaaaaaaaaaaaaaaaaagtgtgtgtgtgagtgtggttggggggagagagtgagagagtagaggaggaaaaagtttaaaatagtttgggagtttggagagtttttcgtgaaatatagatttattaatttttttatttttttattttaattttttttttttttagatagagttttgttttgttttttaggttggagtgtagtggtattattttagtttattgtaagttttgttttttaggtttattttatttttttgttttagttttttaagtagttgggattataggttttcgttattacgttcggttaatattttgtatttttagtagagatagtgttttatcgtgttagttaggaggtttggattttttgattttgtgattcgttcgttttggttttttaaagtgttgggattataggtatgagttatcgtgttcggtttaaaaaatttttttataaaagtatttgatttaatgtgttgtgggttttttatttgtttgtttttgagataagttttttgttttgtcgtttaggtttgagggtagtggtgcggttttggtgtattatagtttttattttttgggtttaagtgatttttttattttagttttttatgtagttgaaattataggtgtgggttattgttttagttaatttttaaattttttgtagagatgaggttttgttatgttgtttaggttggttttaaatttttgggtttaaatgatttgttcgttttggttttttaaagtattgggattgggattataggtatgtaattatcgtttttggttagttttttttttttttttttttttttgagatagagtttcgtttttgttgtcgaggttggagtgtagtggcgtgatttcggtttattttagtttttttttttcgggtttaagcgatttttttgttttagtttttttagtagttggtattataggtatgtattattacgtttggttaatttttgtatttttagtagagacgggggttttattatgttggttaggttggttttgaatttttgattttaggtgattcgttcgttttggtttttttaaagtgttgggtggcgtgagttattgtgtttagtttaattttgtatttttagtagagattgggtttttttatgttggtgaggttggttttgaatttttgattttaggtgattcgtttgttttggttttttaaaatgttgggattatagatatgagttatcgcgttcggttttttttttttttttttttgggatagagttttattgtgttattaggttggagtgtagtggtatgatttcggtttattgtaatttttgttttttaggtttaagcgatttttttgttttagtttttcgagtagttgagattataggggtatgttattatatttagttaatttttgtatttttagtagagattagtttggttaatatggtgaaaatttatttttattaaaaatataaaaaattagttaggtgtggtggtgggtatttataattttaaatatttaggaggttgaggtaggagaattatttgaatttgggatacggaggttgtagtgagttgagattacgttattgtattttagtttgtttgggtaatagagtaagattttgttttaaaaaaaaaaaaaaattttagagtattaggaaaaggaagatttatatttttattatggtaatttgagtttgttgtggttttgttgttgttgttgttgttgttggaaagatgtttaagttattgttttgatttttttttttaatttttttttgggtaaaaattattagatggttatgggtgggtaggtttgtaattttagtattttgggaggtcgagcgggtggggtggttaaggattatttgagtttaggagtttaagattagtttgggtaatatagtgggattttgtttttataaaaatgaaaatattagttgggtttggtggtaagtgtttgtagttttagttatttaggaggttgaggtgggaagattgtttgaatttaggtggttaaggttgtagtgagttgtgattatgttattgtattttagtttgggtgatagagtaagattttgttttaaaaaaaaaaaaaaaatatttttttttattttttttttgttatgatttttggttggaaggattatattagtaaaaaagtatttatggtttttggtttttggtatttgttgtttaggttagtgtttattgttattgttttttttttttatttaagggatagttgagaagatagagagagtttgagttggtttgattttaagtaaaggggttgggagtggggattaatgtgtgaagggaaggagggttatgtaaggtgaaaggggatgttggggaaagggttttatgttagaatttggttgttgatttagcgggtatttattaggtaatgatgtgtaaagtttatcgtaaaaagaaaataaaattttaggattttaagtttatgttaagatggaagttaagttttggagattgaattatgtagtatgtttgtaattttgttttttatagatttttttttatattgtttttgttttgtaatgagattttttttttaattattgatttttgttgtagattaattgttttttttattgttttgtatttgatttagattagatggtatttaagattttatgattattgtatttttagtgtggaatgtaaaaaatatttttttttattttttaaaaaagaaaaaaaaaattgattaattagattattgtaattatgtaataagttttattatagaattgagagttgatagcgtgttgatagttttcgtagtttttgttggttttcggcgttttttcggttttggcgtttattttggtcgcgtttgaggagttttttagttcgttattgtatcgtgggagttttttttgggttggtcgaggtcggagtcggttttttcggtttgcggggaggtgtggagggagaggcgcgggcgggaatcggggttgtacgtagcgtttgtgggttagcgtaagtttcgggtgggcgtgggttcggttgtttcgtttttggagcggtaggttggtttataagtttcgggtagggtagtgaggggtttagtatttgggttagtagtttgttgtgttcgattttttacggggttttagttgttttattataggataggatttaggatttgtagttcgttatgtttgagttttaatttcgtcgtgggtttttgtgttgtagagttttttcgacgagcgttattttttgttttacggtttttagttttattaattttttaagggttgaagagcgtaggcgtatggggtaggattggtaagtagttttatttgcggttttagtgcgggatttattgggtgaagttagttgggtttttgagtgtggtggggatttggagaatttttatgtttagttaagggattgtaaatatattaatcggtattttgtatttagtttaaggtttgtaaatatattaattagtattttgtgtttagtttagggtttgtaaatgtattaatcgatattgtatttagttaatttagtgaggatatggagaatttttgtgtttagtttagggattgtaaacgaattaattagtattttgttaaaatggattaattagttttttgtaaaacggattaattagttttttgtaaaatggattaattagtaggatgtgggtggggttagataagggaataaaagtaggttgtttgagtgagtagtgatatttcgttttggttattttttatagagtggaaggtttgttattttcgtttttgtaataaattttattgttatttgttttttgggtttatattatttttatgaggtgtaatatttatcgtaggggtatgtagttttatttttgacgttagcgagagtacgaatttttcgggaggaataaataattttagaggcgtcgtatttaagaattgtaatatttttcgtgagggtttgcggttttattttttaaattaatgagattaagaatttattaattgtgaatatagaataatgttgaaattttaagtttttataaattttttgtttatataagcgattttaaatttttatatttttggaatatagattaatattttttggaatttttagttttagacgggttatttttttaatatttgtagttggataaattttttttttttttttttttttttttttaaatttatttttttattgataatttttgggtgttttttatagagggggatttggtagggttatgggataatagtggagggaaggttagtagataaataagtgaataaaggtttttggtttttttaggtagaggattttgcggtttttcgtagtgtttgtgtttttgattatttgagattagggattggtgatgatttttaacgagtattttgtttttaagtatttgtttaataaagtatattttgtatcgtttttaatttatttaattttgagtggatatagtatatgttttagagagtatagggttgggggtaaggttatagattaataggattttaaggtagaggaattttttttagtgtagaataaaatgaaaagttttttatgtttatttttttttatatagatacggtaattattcgattttttaattttttttttattttttttgtttttttattttataaagtcgttattgttattttggttcgtttttaatgagttgttgggtatattttttagacggggtggtggtcgcgtagaggggttttttattttttagtaggggcggtcgggtagaggcgttttttatttttcggacggggcggttggtcgggcgggggggttgattttttttatttttttttcggacggggcggttggtcgggcggggggttgatatttttatttttttttcggacggggcggttggtcgggtagaggggttttttattttttagtaggggcggtcgggtagaggcgttttttatttttcggacggggcggttggtcgggcgggggggttgattttttttatttttttttcggacggggcggttggtcgggcggggggttgatatttttatttttttttcggacggggcggttggtcgggtagaggggttttttattttttagtaggggcggtcgggtagaggcgttttttattttttagacggggaggttggtcgggcggagggttgatttttttatttttttttcggatagggcggttggttaggcggggggttgatttttttatttttttttcggatcgggcggttggtcgggtgggggggttgatttttttatttttttttcggacggggtggttggtcgggttgaggggttttttattttttagtaggggtggtcgggtagaggtattttttatttttcggacggggcggttggtcgggcggggggttgatttttttatttttttttcggacggtacggttggttaggtggggggttgatttttttatttttttttcggatggtacggttggtcggtcgggggggttgattttttattttttttttagatggggcggttggtcgggcggggggttgattttttttatttttttttcggacggggtggttgtcgggcggagatgttttttattttttagatggggtggttgcggggcggagaggttttttattttttagacggggtggttgttaggtagagggtttttttattttttagacggggcggtcgggtagagacgttttttattttttagacggggtttcggtcgggtagaggtattttttatattttagatggggcggcggggtagaggcgttttttatattttagacgatgggcggtcgggtagagacgttttttattttttagatgtgatggcggttgggaagaggcgttttttattttttagatgggatggcggtcgggcggagacgttttttattttttagattgggtagttaggtagaggggttttttatattttagacgatgggcggttaggtagagacgttttttattttttagacggggtggcggtcgggtagaggttgtaatttcggtattttgggaggttaaggtaggcggttgggaggtgtaggttgtagtgagtcgagattacgttattgtattttagtttgggtattattgagtattgagtgaacgagatttcgtttgtaatttcggtatttcgggaggttgaggttggcgggattattcgcggttaggggttggagatttgttcggttaatatagcgaaatttcgtttttattaaaattagttaggtatggcggcgcgtgtttgtaatggtaggtattgggtaggttgaggtaggagaattaggtagggaggttgtagtgagtcgagatggtagtagtatagtttagtttcggtttcgtatgagagggagatcgtggggagagggagatagagggagagggagggagagtcggtggataaattttttaaattagattttaagtttggtatagtggtatgtgtttgtagttttaattttatttattttaggaggttgaggtaggaggattttttgaattttagtttgaatttaatttgggtaatatggtaagattttatttgtaaaaagtaataatattagatttttagtttttgttcgtttgtttaagatagtttcgttgtgttttttagattggaatgtaatggtatgattttggtttattgtaatttttcgttttcgggtttaagcgattttttttttttagttttttgaatagttgggattataggcgcgatttataatatttagttaatttttgtatttttggtagagacggggtttcgttatgttgattaggatggttttgaatttttgattttaggtgattcgtttgtttttgttttttaaagtgttgggattataggtgtgagttatagcgtttggtttagattttgaattttttaattattattttttagattgataatatttatttcgatttttttttttttgagggagagtttcgttttatagtttaggttggagtgtagtggtatgattttaatttattgtaattttcgttttttaggtttaagcgatttttttgttttagttttttgagtagttgggattgtaggtgtttgttataatgtttggttaattttttgaatttttagtagagatagtgttttattatgttggttagattggttttgaatttttgattttaagtgattttttttttttagttttttaaagtgttaggattataggcgtgagttatcgtgtttagttaatttgttttaatttttaaataatttattttattttattttttaaatatttttttggtcgggtggggtggtttatatttgtaatttcggtattttgggaggtcgaggcgggcgtattgtttgaggttaggagttcgagattagtttggttaatatggtgaaatcgggtttttattaaaaatattaaaaaattagtcgagcgtggtggtaggcgtttgtaattttagttatttaggaggttgaggtaggggaattgtttgaattagcgaggtagaggttgcggggagttaagattgcgttattgtattttagtttgggtaatagagtaagattttgttttaaaaaaaaaaaaaaaatttttttatagagtagagttaatttataagtagtgtgtttagagtcggtttattttgttttattagtataaataagttttttttttttttagttttttgttatttgttttaattttttttgtgtatttttttttttttttaagatgaagttttgttttgtcgtttaggttggagggtagtggtataatttcggtttattgtaatttttgttttttaggtttaagtgagttttttgttttaggttttcgagtagttgggattataggcgtgtgttattatatatggttaatatttgtatttttagtagagatggggttttattatgttggttaggttggtttagaatttttgattttgtgattcgtttatttcggttttttaaagtgttgggattataggcgtgagttattgtatttgatttttttttgtgtattaaaagaaaaaaaaaaagttggaaaaaaaaggttttttaattatttttgtaattttgacgtatatataatttattttagttggatatttgtatttgtttaaaagttttgattttggtttttaaatttaaacgtattacgaattatttagaaggtttgttaatgtttggtggttttaatattagagttttagattttatgggtttgtaaagagtgagggagggaaggttaagtttttttttttttttgaaggttttttgttttggtttggttttttggagatgaggttttattttgttatttaggttggtgtgtagtggtgtaattatagtttattattgtttcgaatttttggggttaaagagattaagttatttttttatgtagttaggattataggtgtgcgttattatgtttggttaatttttaaattttttagatatggggtattgttatgttgtttaggatgttttttaatttgattattttgttttggtttttcgaagtgttagtattatagatttgagttattatatttagttaggaaggtagtgtttgttttttaagttttttagtatttttgtttttaataggtagtagtttatgggttagatatttatagtgtttttttttttttgttttttattatttttttttttttttttttttgagtaagggtttttttatttatttgtaggttgaatagattttttttataagtatttgtttggggaatatttttttatataatttgttataggaagtgtttatttttttgttaggttagttgggataggatttttatttgtattttatatatttgtattttattttatggaggatggtattttattttatgttagaaatataaaatagcgtggatttttttttttttagacggagttttattttgttgtcgaggttggtgtgtagtgttgtgattttagtttattgtaaatttcgttttttggtttaagtgatttttttgttttagttatttgagtagttgggattataagtgtaagttaatacgtttggttagtttttgtatttttagtagagatgggattttattatattggttaggttggtttcgaatttttgattttgtgattcgtttattttggttttttaaagtgttgggattatatgtgtgagttattacgtttggttaagtgtggattttaaaatattttataggttgggtgtaggggtttaagtttgtaattttagtattttgagagaatatggtcggtagattgtttgagtttagtagtttgagattaatttaggtaatatagtgagattttgtttttattaaaaattaaaaaaattagttcgtcggtattatggtttatgtttgtaattataatattttgggaggtcgaggcgggtggattatttgaggttaggagtttgagattagtttggttaatatggtgaaatttcgtttttattaaaaatataaaaattagtcgggtgtggtggtgggtatttgtaattttagttattcgggaagttgaggtagaagaatcgtttgaatttgggaggtagaggttgtagtgagtcgagatcgtattattgtattttagtttgggtgttagagtaagattttattttaaaaaaaaaaaaattaaattaaaaaataaataaataaaaaataaaaaatattttatggtattttttttatatttattatatttgtgaagattaatttgtttttcggtgataagaaggaatgtaggttgggtgcggtggtttatagttgtaattttagtattttgggaagttgaggtatgaggattgtttaagtataggagttttatattagtttgggtaatatagcgtaattttgtttttattgaaaataaaaattaaaaaaattaattaggtatggtgttattgatttgtagttttaattatttcggaggttgagacgtgaggattatttgagtttaggaggttgaggttttagtgagtcgtgattgtgtaattgtattttagtttgggtgatagagcgagttttgttttaaaaaaagtaataataaaaaaagagggtatgttaaaaggaaaagaggatttgatttgttaaagttagatttttataggtagtacgtatattaggtttttttttagaatttatttaggtttataaggatatatgaggaaaatagatacgaagatgtgtattgatagaattatagagattttataaatatttattattttttattaaaaattttaagttataaatattttgattgatagttagttatggtggtgtatttagtttttattttgaaattaaatattttgttatttggggatttttattagttttgtcggttattttatcgtaatattaaagaggaggtttagttttttttagttttttgagtttatattgatttaattttatagtttattagatttgtttaagataggattaattaatgtttcgggagggtagagagggtggtggggttatatttagttatatggaaagatagtatttttagatgagggtaggatttttttgtgggagaggacgtttagtttttagttttaaaggaagtgatttttttggtaaagggaaggtgattttgttaaggttggagtttaaaggaagatggaattgttttttaggcgtttttagtagattttttatagattcgtgtttttgaaggtagagttttgaaggtagaatatttttgtggtagtggtatagtttagagtgttttatagatattgattttggttacggagatgttttttgtgtagtggtttcggttttttttatataggacgtagagttggggggtttgtttttttttatttatgttgttttttagggttgttagggatgaatagttattggggtttggttatagttggattgttttttttcgttatgaggtattattgttgaagttttatcgtagggttaggtttatttttggggagagtaggagagttagggagagagggtttttgtttaggttttgtttagatatagggttttttttgttgattttatttatgaggtatttacggaattttggatgtgttgggttggagaagaagataatgtcggagttggtgattatagtttttgtagttattatagggtttacgagtttagggtcgaaggttatattacggggttttagtgtattataggtattatagttgcggaggataattcggtagtggtagtggtagttgttttggtttcgggtattgatgacgattgagttatttgggagtttatagggttgaggggagaggataggattttagggagggaatagggaaaatgttttgttttcgaggggagtaagggtgtgtggtattgagtggagtagttagattttgggtttgtgcgtgaaatgatgttttggagggtagggagggttaaatgggtagggaatattttatggatttttgatttggtatttattaggattgaaattatttttttgtttgggttgatcgtaggggatgtcgttgattttattttcgtagcgttaggaggtattatgattatcgttgaggagatagaagatttcgtttcgttttagcgttttatggttatatacgatgaggcggttttttcgtggttttcgttgtttttgtgggaaagggaattgggtgttatagaaggagattttaggggtttagaggtagggatagagaatttattattttttaaatgtaattatatgtatggtttttttgagtttagtttttgtttattgagggttttagttagattttataaatatatattttgtttgaattaagaagtttttttagggtgtatagttggatatgtgtattaggggtttagttatagggtgtatgagagtttaaatttaatttgtgtttattcgttaagttgtgtattttggtataggtttgtgtttgtttaaagaggtagtgtttttttttattttgtatgagggtattgtatggattaacgtagttttgttgataatgttaaatgggaagttaatggtagagttttttttttttttgataatgtgtttttattaggatgttttgttttttaaggaattttatttaagttagaaaatttgattttagagaattttttttttggaaaggagtttatttgggggtattttttagattttttataaggtagttttttttatttattttttaggatagagatttgaatattagagttcggtttaggggtaaatattttagtgttaatatttagggagagatttcggggtgtgttttaggaaatattattatttttgttttatattaatatggtagaggttatttggtagtcggttttgtgagtataaagggagtagaaaagaaatattatttttgttttaatatcgtttattattgttttaaggtttagtttatcggggatatttttattattgataatgaacgttgtaggagattatgtgttgtttgaaaaaaattggaggaagaaatttagagtgagtattttgtaggtattttttttattatttttcgttaattttttattttttgttagggattttaggtttttcgatggttttagggtgtaatttaatatttgtattatttatattttttgttttgttttatttttttttattgtatttattattttgtaatagataaaaaagtttatttgtttattatgtttgtttgtttttttttagtataatttaaattttgagggtagagatttttgatttgttttgttcgtggttatatttatgaaatttaaaatagtgtttggtataggtatatagtatttaataaatgtttgttaagtgaatgtttaattttttggtgattttaatttttagattattgttttagatatttgtttttttcgggttttttttattttttagggatttaggtaattaattttttaagtttttttatttttagggtttttgggtttattgggttgtttatttatttaatttagtatcggtttttttatttagatatttttatattttggtttatggattttcgtagggcgatgaatttggtttttttatcggatgaggatatttttttcgttttagtaaaggcgagaagagtgtttcgcggagtggttgtgatgagcgggatgcggaaggtgtttattgagtcgatttgtttttcgtttatttatagtagttgttttatggttattagcggttgtatttgttatgggaggaggaagggttaataaagataaatttgttttgggggttttaggaatttacgtttcgatgggagagggaggatttaatggggatttcgagtaggggatggggttttagaataagaaagaggaatacgaaggggagtttggagcgaagttggaggttcggagtaggggagggtttacgaaaggagaaggcgtttttagggagggaaggggattttaaaagaggaaggggttcgaatgaggagaaggacggggattcggagagggagaggggttgggagcggtaggaggaaacggggtttgggagaaagaaaagggttttgtcgcggaaagtcggtttagtcgttcgcgtttcgggggatattaggtgtcgattatttgcgcgggtcggggatggggttatgtaaagggtgatttattagatcgaagtcgtttttagttttggattaggaggttgttagagatagtagtaggaagatcgcggtaaatatttaaattttatagtttttttagaagtttagaattcgcggtttttagcgtttgttcgggagcgtcgtgttgggtcgttttttagttattttttttcgtagttgtcgcgattttggtagttagattttatagagtcgggagttagttgattcggattttttaaagcgtagatgttatttttaagttcgtttcggtttggaggtttcgtcgcgtttttcggattttaattggtttttaagtagtttatttttttttacgtgattacgtagtatttcgaagtttgttttttcgattggtttttttggaggtttttttggaggttcggagcgcgtgattcgaacgggaagcggattggttggggtgaagaagggattggtattatttttattgggttttttgattggtcgcggtattaggatacgttataggggcggggtcgattttaaagagtcgggcgcggaaaaaaaaaggtcgtttgtcgtcgtggagagaatgagttatagatttattgagttaataaaatatttttaataaaatttttttgtttgtttgttttgttttggagatagagtttgttatttaggttggagtgtagtggcgcgatttcggtttattgtaatttttgtttttcgggtttaagcgatttttttgttttagtttttcgagtagttgggatgataggtgtatgttattattttcggttaatttttgtatttttaatagagacggaggttttattatgttggttaggttggtttcgaatttttgatttaggtgattcgttcgttttagttttttaaagtgttggattataggcgtgagttacggcgtttggtttaaaatttttttttattataaaatggagatttgtaaggcgaagtgaggttggatggttggacggtgggggtggggtgtagttttggattagggtcggagttgttatttttttttttttttgttgttcgggggcgtttcgttttttttgtttagaatttttagaaggtttttggatatgtagtagggtcggtttagggagtcgttgtttcgttttaggttttttattgagtcgtaatagagatcggttagagcggattttggggttaggaaatcggggattgggaggtaagttgtttgcgggatttggaatttaagttgtattattatttttattttcgggtaggttatgtaattttagtttttttttgtgaagtggggtcgggaatattatgttgtatagagcgatgataagaattagcggaaaaaatgtatgttagtcgtttaggaggagattggtaaattttgaatggatgtatgttgtagagtaagaaaattttttgtcgttatagttatttgttgggaagtttttttaatggtttttttttttttttaattttttttttttgttttgagacggagttttgttgtcgtttaagttgaagtgtagtagcgtaatttcggttcgttgtaattttcgtttttcgagtttaagcgatttttttgttttagttttttaagtggttgggattataggcgttcgttatcgcgtttagttaattttttgtatttttagtagagaggggttttattatgtgggttaggttggtttcgaatttttgattttagggtgatttgtttatttcggttttttaaagtgttggtatgataggcgtgagttattatgtttggtttttaatggttaatttttattcgagattttttagggaagatagtagagatttttttattagaatgttttttttttggagagtttatcggtttgggggtttattttttttttttttttttaaacgtttggttttaggatgttataagaagttttttttggttcgtttagtttataaaggtattgtttttagaagtattaaatttttaaaaaaaaaaaaaaaatgtttgaacggtttagtattttaaggttggggataggtggttgggggtgttatttacggaagtagaggaagagcgtgtttatatatatgtcgaaaacgttgaagaagtcgttggcgatgatataggtttttaggatggaggtttggaagatatgattcgttggggttattgggtttttttggggagttgggggtggagtagtagagaggggagttatttattatgatgggtagttagtaatagttgaggtgggggtttttaaagtttttatttagtttcgggatgcgatcggagaaaaaaaagaaggataggatttttgtggaataattttgggggttagtgttgtatttttgaggttatttttttagttgtttagtatttttattttttgtttttatagtttttggttttttatttacgttttcgattattagtagttttttaaagaatagtagtaggtttgtgattttgtttaggacgattattttgtgttagaagttagggtaggttgagggtgagaggtttggtaatgttgagagtgaaattggtttcgtaatttgtggggattggtgtaaaatgaaaattgtttacgttttaagatggtaagagtagagtattaaattaagtttagggttcgattgagtatagtatatttacgaagttagttttgggtgggagattagaggagggagttataaagcggggggggagtagtttaatttgataatgtttcgtatgagtagtatgaacgtatttttggttgagatatagaaatttttttcgtagatggcgatttgagggaggtggaaaggttagagttattaaggcgagttgtttggattaggatgggggtgtttagattaaagggtattagaataaagggttgtttgtagtgtagtttattatgatgtatgtattgcggtttaggaatttgataaatttttttagatattagaggtagtatttgaaatagtatatgatgtagcgggttatagggttttgtatttttgggagcgaggaaggtttatgtttggttattgtttttttttaatggttttttttagtttttgatttttatttcgattttagatttatttttgagtttgtggttaatatattttaagatgattcgggttatttgtataagggttaggatgagggttttaaatgttaatgatttagtgtggtaattgtagagggtgttatgtagttagagatagttttaggatttttggggttttcgtgtttataatgattaggtttttgttttatttttatcggagtgtgcggatgaaggtagagattaaggggaaggtagggatgttttggggtttgtggaaggtttagtagaaggaggtaaaggttttagcgaggacgtattggtttagggttagtatttagttaagggtttagaagagttttaggattttatagatttgtagattgaagatagaacgttggattaggtttttggatgagtagttttggaagacgtatattagttttgggtacgaggagtttataaggtgggtttgggagggtagacggggatagagtaggtttaggtatcgggggttttagtatggagtttgggcgttttatttttagtagtttttgttttttttagagttgataggtgggaagtagtttttttggattgcgggaattaagttttgtcggagagttttatttttaggtttaaatttagtttggtttgtttatagtataagtataattagtttttttagttttaattagaggggaaggtatttatttagtatttttattttagagtagtttttgtaacgtttattaaaatttttttcggtaaattgaataggttgggtatttgatgatattaaggaattattgttaattttgtgagatgtgataatgatatagtggttatgtttttaaatagtttttatttgttgagatttattttaatgtatgtataggtgaaatggtatgatgtttagaatttgttttaaaagtttttagaaaaaaaaatttatgaggcgggtgtagtggtttatgtttgtaattttagtattttgggaggtcgaggtgggcggatcgtttgaggttaggagtttaagattagtttggttaatatggtgaaattttatttttattgaaaatataaaaaattagtcgggcgtggtggtagacgtttattattttagttatttaggaggttgaggtaggataattgtttgaatttaggaggtagaggttgtagtgggtcgagatcgcgttattgtattttagtttgggagataagagtaaaattttattttaaaaaaaaaaaaaattataggtgaggatatagatgaaataagaatagtaaaaagttgagggttgtggaatttgggtatagggaatttattgtgttattatttttatttttgtatatgtttaaaaatttttataataaaaagtaaaaagttataaattaaaaagtaattttttttagtaaatataattaaaaaaatttttttttgatatagggtttcgttttgttgtttaggttggagtatagtggtttaattttagtttattgtaatttttgtttttcgtgtttaagtaatttttttgttttaattttttaagtagttgggattgtaggtgtgtgttattatgtttggttaattaaaaaattttttttttttttttgagatggagttttattttgttattatattggttaggttggtttcgaattttggattttatgatttatttgtttcggttttttaaagtgttgggattataggtgtgagttattgcgcgcggttttttgttagtttttattgttagattataagtaagttgaaaataatatttacgttatatttagtatagttgtttatgtgtataattttaatatttttggaggttgaagtaggtaaattgtttgagtttatttgtttgagattagtttgggtaatatagtgaaacgttattttttaaaaaaaaaaattagtcgggtatggtggtatttgtttgtagttttagttatttgggagattgaggtgagaagattatttgagtttgggagattaaggttttagtgagttatgatcgtattattgtattttagtttgtgtaatagttttttttttattaaaaaagaaaaaaaaaagaaaaagaaaaagaattatattattttgggttttgtatatttagtgtttggtatatagtgggttttttgtatatgtaaataaatttttttttttttttttttgagacggagtttcgtcgtttaggttgtagtgtaatggcgcgattttagtttattgtaattttcgtttttcgagtttaagtaatttttttgttttagttttttgagtagttgggattataggtatttgttattatgtttggttaatttttgtatttttagtggagataggtttttgttatgttggttaggttggttttaaatttttgattttaggtgatttgtttatttcggttttttaagtgttgggattataggtatgagttatcgcgtttgttaaattttttttttttaataggggtggggttaatgtttgtagtatagtttatgtttttagtttagacgaggtgaagatatgataggtttgagaagagtaaatttttagtagtttagcgttattttcggggaattttataggggaattttggaagtagtttttttttcgggtttttcgtagggagttttatttggttattatttagggttttgtgttttaagggagtaagatttaataatataatataatttaatttgttgttgagtttttattaggtgttaggtattgtattaagtattttatgtgtttaaagttattttatttttttagttattttagggatgggtattataattatttttattttatagaggaatggagttgtatgtggtggtttatttttataattttagtattttgggaggttaagttagaggattgtttgggtatttgattatatcggggtaattttaggagtttaagattagttcgggtaatatagtaagattttgtttttataaaaagtttaaaattagtttggcgtggtgttatacgttagtagttttagttgtttaggaggttgaggtgggaagattgtttgagtttgggggatggaggttgtagtgagttgagattgtattgttgtattttagtttgggtaatagagtaagattttgttttaaaataaataaataaataaataaataaataaataggagtaggttgagatttagagggtgaagtggttgatggtttttaagttagagtaatgttttggggaggggtggagtaagttttggtatttagggttgttttttttagttttagtttttttttttatatgatggatggtttaataggagtattaggtattttgggaattggttttttttagttttgttgggggttgagtgtgtgattttgtataagtgttttgttttttgtggttttagttttttttgtataatgaggaatgtggtttttatagttttttatttttattagtttcgtttttatgttttttgtttttttttatcgtggggttgtatgatgtatttattggtatttttttatagtcgggggagttgatgttggatgtttagagtatatattggggttgtttcgatgtagttaggtatttagaggggagttaaggaaagtatgattatacgaggtttttataggttattcgttttttagggatttgtttttaggtgtttgtgtagatcgtttgttgtatagagagggttgaaatttagtttgtgtgtatttttttaattttgtttaggtatagtgttggtgtgtttgtttagagaaaggggtattttttttagtgatattaaggtattttataaggtaagtattgttttgttttttattaatttttaggattttaagagtggttggttgcgtgggtagaggatatagagtagttatggtttagtaggtaatgtagatgaggaggaggataaaggtgattagtgggtagaatatggtagatattatttgttttatagttttgtagggagataaagttgttaatcggtatcgttttagttgtttatttttttaaggggttgatttcggtcgggcgcggtggtttacgtttgtaattttagtattttgggaggttgaggcgggcggattacgaggttaggagatcgagattatgttggttaatacggtgaaattttatttttattaaaaatataaaaaattagtcgggtatggtggcgggcgtttgtagtgttagttatttcggaggttgaggtaggagaatggcgtgaatttaggaggcggagtttgtagtgagttgatatcgtattattgtattttagtttgggcgatagagcgagatttcgttttaaaaaaaaaaaggggggggttgatttcgttgtttttattggggtttgttttatttttttagggtgggattaatagggttagtgatattgttttttatatttgtgtttttagggtttggtgtagggttaggtatattgtaggtgtttattggataaatagaattgaataaattaggtttataggatttttagaggaaattagggttatagagaagttatttggggtagtttcgggtggagtaagggaagattatttttaagcgtgattttttggtaggtgtgtgtggtagtttttgatcgggagtaagttgttgttttttttggttcggatttttgtcgttttatttagttattattatttttattaatttttttagaaggtttatgttatattttaggtatttattgaatttttaagataattttagaaggtaggaattattgttatttttattttatagatggggaagtaaagttatagtagtgtttattattgtgttatatttttttttttttttttgaggttttttgttatttttttagtattttttaggttttttagtatttttgggtttacgttgtttttaattttattttttttttaggtaggttttaatttgttggttttttttaggagggcgatggtaatacgaattcgttgtcgtaggaagatgagtattagtagtaggatggttttaagtatcgttaatacgattattgtagaggatggggtagatagatttaggttagggttagggttggggtcgggtatggtttagggtagtttttgggtagttggtggtttgggggtgggtaggatatttacgggcggttagttaggttttttgtacgttttggtaggtattgaggttggtggtgaaatttagttgggagatggaggcgtttttgtttcgtagtattcggtattttttttagtagtagtagatgttatatgttagtacgtttagtatttttaggattagtattagtattaggggtttagttattaggcgtagaagtaagataaatagtaggtttaagattagagttatttttagggtattgtaggtagggtgaggatagtgaggtttagttttagttttttaaatttttttttttatagaggttttttttgtttttttatatattatttaatgtttttagattaggttttttttttttataaattttgttggttttggaatttattcggagttttggtttttttttttttgtttaaagtttgtgttttagatattgggcgagggggtagaggattagggaggaagaaggtaaggatataagaggaggggaatttggtgatttatataagaatttaatattaggattgggtaaaatttttaaagattttaatattgatgtttcgggtattgaggttgttaataagatcgttgttggggagatagagttagatggggttgtgggtggaaggggtgtggttaggatgtgggggagggaggtgtttatttgattttttgttgtatggtggtgttattggtgatttttgggagcgtcggtggagtaatgttggtttatggaaagtagcgttttagagttggaagggagagtcgggttgttgggttgggggttaggagttttgtttggagggtttttggtttttttttagtttatagtgtttttaggggagggaagggtgatgggttttgtattttttagtgggttgtttttgattttataaatgggtttttgttttgtggagtttagtttattttttgttttttttttttgtcgtgttttggtttggattttttttttcgttggttttaatttttagaatattttgttatttttttatttattttttattcgagtggagtgttagggagatcgtggtattgtttggattttattattttagggttttgggtttttttgtgatttagatatttttagaggttttgttttagagatagtatttatattttttggttaggtttttaggtttttttgtttaaatttagtttatgtttttttttaatttgtatttttgtttttattgtgttttttttttagggttttttttttattagaaattttatttatgattttttgtttaaatttagttttattttattttttttaggaagttttttgattttatttttattttttttggtaattgttatgtgtttatagagttatttattgttatttttgtaataattttgttaggtagttttgttttgttatttatttatttatttatttatttatttatttatttttgagttaaggttttgttttgttatttaggttagagtgtagttgtatgattatagtttattgtaatattgaatttttgggtttaagcgattttttttatttagttttttaagtaattgggattatagatgtgtattattatatttggttaatttttaaattttttgtatagatggggttttgttgtgttgtttaggttggttttaaatttttgggtttaagtaatttttttattttagttttttaaagtgttgggattataggtgtgagttattttatttagtttatttattttttagaggtagggttttttattttattgtttaggttggagtgtagtggtataattatagtttattgtaatttttaattttaggatttaagtgattttttcgttttagttttttgagtagttgggattataggcgtgagttattgtattttattgttatttatattttaaagatgaggaaataaggtttagagaggttgtatagttgggttaagattatagggttggaaagtgttagaatttatatttagatttatttgattttgaagtatttatttgagatattttttattgtatttaaattggtaattggatattttattttatgttataaattgtttaattttttttttttgagatggagttttattgttgtttaggttggagtgtagtggtattatttcggtttatcgtaaatttcgtttttgggtttaagtaatttttttgttttagtttttcgagtagttgggattttaggtgtttattattatatttggttaatttttgtatttttagtagagacggggttttattatgttggttagattagtttcgaatttttgattttgtgattcgttcgtttcggttttttaaagtgttgggattataggtgtgagttattgttttcggtttaaaatttttgtttgagacggagtttcgttttgttagtaaggttagagtatagtggcgcgattttggtttattgtaaagtttattgtaatttttgttattcgggtttaagtaatttttttgttttagttttttgagtagttgggataagaggtgtatgttattacgtttagttaagttttgtatttttagtagagatagggtttcgttatgttggttaggttggtttcgaatttttgattttaggtgatttgtttgttttagttttttaaagtgttaggattataagtatgagttattatgtttggtttaaaaattgttttatattaaaaatgatatttgtaattgggtgtcggggtttatgtttgtaattttagtattttgagaggttgaggtgggaagattgtttgaatcgaggagtttaagattagtttgggtaatatagtaagattttattttttaaaaaaaaaaaaagatatttgttattggaaggaagagtatattgtaaaagaaaaaaagtttaattgtgattttattatttagttacgtttatttataatatttgaataaatatttttttagttttttttttgtgtatatataaaaatgatatgtgtgtaggttgggcgtggtggtttatgtttgtaattttagtattttgggaggttaaggtgggtggattacgaagttaagagtttaagattagtttggttaagatagtgaaatttcgtttttattaaaaatataaatttaataaataaatttaataaataaaataaaaataaaaattagtcgggcgtggtggcgggtattatgtgttgtaattttagttattcgggaggttgaagtagagaagcgtttgaattcgggaggcgggggttgtagtgagtcgagattacgttattgtattttagtttgggtaatagaggaagatttcgtttaaaaaaaaaaaatgtgtgtgtagatttatttatgtatgtttttatgagatttttatatagtttttttgtgaataattttaatttttttatttagaatgtagttgaagtagggagtagttgttatttttgtttttgtttttagtatttggtatatagtaggtttttaaaatattgatggtttgattgtaaggttatataataaagagtaaaatgaagatttgatgttaattttaattttgttattaataagttatgtgattttattttttttgggtttgatttttttatttaagtaatgaaaatattggattagatgacgtttgaggaaggaatttgtgttttttatttggagtagaggggaggaggaaattggggtagagtttttgttgtaggtttgtgattatcgtttgtggtaggagtgaaaggatagatatatagatatagagtaggatgaagaagtaggtttttttattattattatggggtttagtttgttttatattttttaggagagttaatttggtgatgatttatttaattttttttttttttcgtgtttattttggtttttttgggcgatagtgatgaggttaggggtaatatttattatattttagggtatttttggtagataaaagtttttgttttttgtatagaagatttttttaatagtttgtgagaattcgtttttttttatagtttatgggtttttcgggtaggaggatatatatatttgggtgtagagagaatattaaggggttggaatttgagattttgggtgagatttggggtagaggtaggttttaggttttgatttggggtgtggggtattgtaggtcgtttttagtaattgagatgatgttgttggataggatgtagttgaagatgttgaagtataggagatacggtttatttttgtgggaggggagggattatgtgtattagggtttggttaggtgttgggggaggggagggattattagggtggttttttaagaatatagtgggtttagtttagcgtggtttatattagttattttttagtttttggttttagtttagttggggaggtagggagatgtttagaagattttttagagtaagttattattgtagtagttgataaatagtttagagtatgaatttggagttttataattttatattatttttatgattttgagtaagttatttgttttcggttttagttttattttatataaaatagtagtgtttattttatgagattttaatgcgtttgtgtgtgtaaagtttattgtttgtttggaatatagtaaatgttatataaatatttgaggttttattatttattggatatttgtatgtgaggattgttggtattgtttttggaattttttttgaattttaaataaggaaattaaagtttagagagtttgagtaatttgtttaaggttatataattaaaatttggtttagttggggatttaaatattaatttttgaattgtaaaatttatatatttaatacgattttttattgttttttatttttggggggatttaagaagttaattgtttagtaatggtttttaacgtggtttggagttgttagatttagggaggttgaggtggggtggggatagtagggaaaggttgtggaagagtacggataggtttggagtttgagttgggggggtgttttttgtttattttatttcgtttcgtttttgtattttttttttcgtttttgtatttatttgtttttttttatgttatagtaggttttagtagagtttttggggtagaggatttgtcgggggtttttatataattaggttgtagatagaggtatagatgagttattggagggtagggatttagtggggtagttatgggaatggtttttttttgggtttttgttttttatttattgttttggttttgagtagttggaaatttatttataatttttattacgatgtaatttagaatgaagagtaggaagaggacgtagtagatgatatttgtgtagtttttgagagagaaacgaaacgggaggttgagttaaggagatttggggaggtagggtttatggtttggaggggttaagggttagagagttgggtgatgttgtagtatgggtattagtaggttttatttttatttttttattgtttttatttttttattttgagatagggttttattttgttatatagattggagtgtagtggtgtaattttggtttattgtagtttttgttttttgggtttaagtaatttttttgttttagtttttcgagtagttgggattataggcgcgtgttattattgttcggttaattttttttaaatattttatttagaaaatttagttaggtatagtggtttacgattgtaatattagttatttgggaggttgaggtagggtaattttttgaggttaggagtttgagattagtttgggtaatatagtgagattttattttaaagaaattagtttggtgtgatggtgtatgtttgtagttttagttattcggaaggttagggtaggaggattatttgagtataggagttcgagtttgtagtgaatttttatttttaaaatataaaaagaaagaaaatttttttttgggtgggtaaatttttttttgaagtaaaagatagaaaagtatataattcgtaagggtttagttgggtgagttttttcgtttgtgaagtcggtatttaagttaagaaatagaatatttttttagaattgggaagttttcgatgtttgttttagatataataatttttttagggtattatttatttggggtaggagttttttttttttataagttttttattaatattttagtaaatataaagtaaatattggattttatattgtatttattattttcgttagttttcggagtagtgtttagagtttatttgtttttgatggggtttcgaaaggaggggtcgtatttgattggtttttttgagggatatgagaagaggtgtggaggatgagtttttttttgtatattttgttttgttgagtttttttagttttaggattttatttaggttttaggtgtttggagggagatgggttagggtaggattggtaggaggggaaaattggggagtaggaaaggtaggatttaggtttggttagtagtttagtagttttttgggagttttatttaggttgttatggggaggggaaggaaggtttttatagttttcggtttatattttaaggtagttagtttgggaaatggttttggttttttgttttattttggtacggtttttttgagtttttttttagttgggatgtgggatttttagtggtttttatttttttatttttatttttgttttttttttaatttttttttagggattatatagatttatagttttttagggaggttatggtttttttttttatttgttttaggttttattttattttttggtttaaggttatggggaaagaaattggagataaaggtgttaattttagtagggtttggggagggaagcggttttgtatatttttattttggtgggattttagttttttggttatagtgtgtttcgggttttgggttagtagttagagtgatatttgagtttagttatagagattgtaggtacgttgagtttttggttttttttgagtatatatatagggaggaggagggttgggtagttagggttttttgtgggtattgaggagggagagtcgagggttgggtaggagtttgggaaggagcgggtggggtttattttttttaggtgcgttggattttgtttttttatggtttatggataatgattgatttgaagtcgttttaggaagtttattcgggagtttttattgtttgtttttttatggttttaagggatttaagttttttttcgagaaggttttttataggggtttttttttttttagattagaagattaggggggttttcgtaggtgagtttttagtttttattgttcgtggggatttggaggttagtttttagttttttttttttttagaattttagttttttttttttgtagattttggaaataggttttttgttgtttttttttttaggttttattttttataggaattttaggggttttgtttttattttttagagtattttaagattagtttttgtttttagttttttatagagatttttaggtaggattttagttttttttttataaagatttttagttttaattttttatagggatttttagtagaatttattttttttgttattttttttagagattttggtaggtagaggttagtttatttagggtttttttattttttaagggagtcggtaggttataagtagttttcgtttttagagatttagattttaggttgaatttttttttttttatagggattttggttttattggttgtaggttttgtagtataggatatttttagtatttagttttattttgtttagggttttaatttgttattttttatttcggttttgttttttagggttttgtttttagggatttagagtttaggtttgaaatatttttttttttttaaggattttagttttaattttttagaggtatttagttttattttttatgggttttttagtaatagttttagttttcgggttttattttttttttaggattttgattttttttttttatggttttcggttttcgggttttttttttagggatatagtattttttttagtttttttttttggagttagttttagatattatttttaaagtattcgtttttttttttttttatagggtttcgggtttcgttttagttttatcgtaggtttcgttattttcgtttcgttgttttttttttatggtttagttttcggagtgattggagttttggagatttggcgttttatttgttgttcgtttcgtttttttatacgttatagttttattttcgtttgtggttttcgatatattttagttttttttttttaattttgtgtttagcgggttggggagttggagtttgggacgggggtttagggttattttttgggggtattacggattatagtgaacgatttggtatgttttgataagaaaacgttttataatttcgtaaattattttaattgtcgtatatttttaatacgttttcgttaaagattaaagtgtggaaattggatttgtttttttttttttgagatggagtttcgtttttgttgtttaggttggtgtgtagtgatttaattttggtttattgtaattttcgttttttggttttaagcggtttttttgttttagtttttggagtagttaggattataggtgtttgttattacgtttagtaaattttttttattttgaaagatggggttttattaagttggttaggttggttttgaatttttgattttaggtgattcgtttgttttggttttttaaagtgttgggattataggtgttagttatcgtgtttgtgaaattggatttttatagtggttttttatttttttgtttcgtattgggcggttattatattagttatatttgtttagtttgttttttattttattttggtttttggatttatattttttttagttaagtatgttttttttttattttaatataaaaatcgtagtttattattaaatttaatatttattgagaataaaaggaattagttggtatagaggttcgattttaatttattaaattttaattgaggatggggaatacggggggtggttagttttgaagttgtttttttagggaggaattagttttgggagggaggggttgttagatttttagggtttggttgggatttttggttaggaatgtgtgaaagggtggtggggagagaagatggtagtatttttaggtatgggttgcgagtagttggtggtagaggaggcggttgagttgtggttatttatgttggggagagagggtgtggttcgtttttatgtgttgatagggggtagggagtcgagttcgggtagtagtttagggtgtgggtttaggcgggttagacggttttgttttagggtaatggtttcggttgagtgtttgtattttttagagttatattggtaggtgaaatatttgtttttgatgttttagaagcggtcgttatagttaaatttgttagaggaaaataggagtttgtgggatttggatttagttattaagagtttatttcgaagattttgtggattttgttttttgagagggattcgatatttaatttattttttttagatgggatttgagttttttgtatgttttatggatttttagtattagtattgtttggggatttgttagaaatgtagaattttgggttttattttaagtttattgatttaaaatttttttgggaggtataggattgtttttttaagttttttaggaaatatttatgtatattgaaatttgagaagttttgtattattttatgtttggatattaggtatatgttagtttttaggttttaggtttgttgtattttttattttttggtagagtttttagagatttttagagttttattttagtttttttttagttcggatgtttcgggaattgaagaaggcgatgcgtggaaatcgtaggttttggtgtagtatgaagattcggacgggaatgatgttggggttatataggtggttgatgaagcggttgatgttgttatagtaacgggtatttatgtagtatatttttttattttggggtagggggatggtattttttatatttttttcgattttgtttgttttttttatttattgattttttagttttttttttttaggtttttatttgttgattttttagaggtttttgaaagttagttttggggagtagtagggtaaggagggttttttgtttattttgttgtttaagtcgaagaggtaagaattatttttttttatattagttttagtattagagattagtttttcgatatatttgtgggataggaatttatggttttgaaggtgagtgtgggttattaggaggtggttttaggttttatttttttttataagtttgtggaatttggaatgggtagggttggtaggtgtggggaagggaaggtttggagtagtagtggtgggtaagtgaaagggtagtattttagttttgatagaggaagtttttagttagtatagagatagataataagttttgtggttaaggggattaatgtgtaggggtagttggtttgggtggggaagttcgggtttggatatagagaggtttgtgttttaggagttattcggtaggaatgggcgatatggaataggagaggggttaggattgtaggaagagttagaggtataggagtggtaaggaatttaaggtatgattcggggtaagagtatttatatatatttggatattagagggaggagaggagttagttatttaaggagggtgagtagatatgggagatttagatatacggagaggacgtgggtgggaagtgattgttaagagatagttttagtagagtgggaagggtaaaggtcgattttggtagggataggtagtgagtggatggtggggaaattgaggtttagtaggaaggggttgtttgttagagaagttgagagatgatatgatggaaagaaattggatggtttgttgaataggtaagtatggttagaggattattttttttaaaggttaaagaatggttaggtacggtggtttacgtttgtaattttagtattttgggaggtcgaggtgggcggattatttgaggttaggagttggagattagtttggttaatatggtgaaatttcgtttttattaaaaatataaaaaattagtcgggtgtggtggtgcgtatttgtaattttagttatttgggaggttgaggtaggagaatcgtttgaatttgggaggtggagattgtagtgagttaagattgtgttattgtattttagtttgggtaataagagtgaaatttcgttttaaaaaataaattaaaaaaaaaaaaaaaaaagagttaaaggagattaaagtaagattgagggttgtgggatggtagttaagagaaagggggagattatagatgttgggtagagaaagaattgatggagagggataggtttttgaggaggtggatagataggtagttgttattatttttattttatagataagaaaaataaggtttaaagaggttaagtaatttggttaagaatatttagaagtagagaggggtttaaatttaagtttgtttgttttttaaattggtattttttttagttaggaagggcgaggagggggtggaggggaaggtagagggtggaggtggaggggagggaagataagttttgtggtttgggtagagtggaggtaggtgttatttttagttggggggatgggggttagaggcggttggttgtttagttgtaggaataggggttagaggaggttggttggagagtggttagatggagatatgtgatttattagggtagatggttgagagggaggtttggtagttagtagtggttatgtattttttttttattaggtgttaaggtgttttcggtgatttattcgtagatgaaggttttttgtgggatggtttgtagggcgcggattttttagtttattttggttgttcggtagagttgtagtcgtattttgggggtaggagagatggcgttgttgggtggaggttttggaaaagttttaggggtagggaggaaagggtgaggtggggagagggtgggttgtggagtagggttttatttgatgttattttgtacgattcggtttttgtagtttttttagtatgagtacgtttggttatattcgaaaattagcggaggtttaattttgttaaatttttggagtaatcgtttattttagggtgcggaggggaggatagtggtttttttgtggggtttattttagttgtttatttaggaattttaagattttatagagatagggaagttggggttggggaggttatataggttttgagattcgagagtacgaaatgtaggagtattatttttggtttgtatagatttgggtatacgtttatcgttgttttagttatattttaggatttttaggttttgtttagtttttttagttattttttttatagggtaggaggtgagggatatggttttagggagttggtttattggaggttggtttttttgaaggaggggtcgggtgtttgtggttaaggtaaggggtacgtattttgttatattagtatcggatgttgagttggtcgtataggtagttggagttagagtagtcgtttatatacgtgtagtgttggggcgaggaggtagaggttagtttaattttatgatcggtttgggtttttttatttttgatgttttttgattttttaattattgttttttttttggggtttatgtgttataatagtgggtggtgatggttttagggtgacgggtaattagtatggtggtgtttttagggttattgggagtttatatgatattttgttgtgatttaggaaaaggattttttttttggtggggatgcgattttatattagggtttttttttagttaatttttttttggttaggtgtttttgttggtttgaagtttgtttaattgtatttggtagttttcggtgtttttttggggaggtttcgggttttttatttatttgtaggtgggtgatgttgcgatcgatgtttatggtggacgtttcgtagttttttgagatgtatttgtaatttttagggtagggttttttatttatatcgttgatatagggaatgggtacgtttttatagtttcgagttacgtttttgtagaagacgggaagaaggggttgggaagttggaaaagggggtgaggagttattttaggtataaggaagagagttggggaggtttttggggttgggggtaggggagtaaggttgttaggtaagatgtaggatagcgagttaatatagaattttagataaataagaaatagttttttagtatgttttaaaaattatataggatatttttatattaaaaaagtatgtatttgtgtatttgaaattttagtttaattgggtgttttttatttttatttgttgtatttggtaattttagtggggagggggtttgtgggtggttttggggatttagtggtgtatggggaggggttggggaatgttgtgaggatgtaatggagtttggggagggtatgggtggggaggaggtggttttgggtgtagagaggggtttagggtttatcggtagatgattttttttgtgcggatggttcgattttttattttaagtcggagtttgcggttgagttgaagcgtaaattatacgtcggagcgttcgggagttaggttttatgttgtgtttttttttttgtttcgtagtttagggttggttttacgtgataggaataatttgaagaggggataggatgtttaatgtagggtttgaggttgtaagaagtgggggtaggggtattaagggcggggtaggggtttatagtacgtagttatggtagttttttcgagttgcgatgtgtaggggggtgtttttatggtagttgatagtatggaggttatagcgcgtatttagaaggatttcggcgatggcggcgttgttcgtgaaggaggtttagtgtaggtagatgttttttttttgtggaggtaggaggggaatagatgaggtgtaggtagttgggtttttgaatttagtttttattttgtttaggggtttggggttgttttattttaattaaacgtttatttacgttgttagtgagggtgacgtcggcgtttcgcgttagtagtatgcggattatttcgatgtgtttgtgttttgtagtttagatgatgggcgtttattttttattgttttgtgggtgggaagggagtgagggtgggggtagttggttttgtttattaaagtagtaaatggttaagattggttgtgtgtgtgaattttagttttattatttataagttgtgggattttgggtaagttatttaacgtttttgggtcgtagtttttttatttaaaaaatgggattagtagggtcgggcgcggtggtttatgtttgtaattttagtattttgggaggtcgaggcgggcggattacgaggttaggagatggaggttattgtggttaatacggtgaaattttgtttttattaaaaaatagaaaaaattagttgggcgtggtggtaggcgtttgtagttttagttattagggaggttgaggtagaatggcgtgaattcgggaggcggagtttgtagtgagttaagatcgtgttattgtattttagtttgggcgatagagtaagatttcgttttaaaaaataaataaataaaaatgggattagtagcgtttattatttgatgttagagagaaaataaagtaattgttttttttttaaaaaatatagttaggagttggttatggaggtgtatgtttgtagttttagttatttatgtgattgagatgggagggttgtttgagtttaggatttcgaggttgtagagagttatgattgtttgtgaattgttattgtattttagtttgggtgatatagtaagattttgttttttaaaagaaaaaacgaataaaaattttttaagtttgtttatttaaaagttttagaagtagcgataatttaataataataaatatttttaggaatatagattgtattttttaaaaaatgtttttggtcgggcgttgtggtttacgaggttaggagtttaagattagtttggttaatatggtgaaatttcgtttttattaaaaatataaaaattagtcgggtatggtggtgggcgtttgtaattttagttattcgggaggttgaggtaggagaatggcgtgaatttgggaggcggagtttgtagtaagttgtgattacgttattgtattttagtttgggtaatagagtgagatttcgttttaaaaaaaaagaaaaaagttttttataaaggaagtagagttttttagagaaatggtggattttgagttgggggtaggaaatgtgttgaaaggttaggaggtttttaaaggttattgggttattgggttatgttatagttatagaggttttttaaaggggttttttttggataatgatggaataatttaaagattgagaagaatgttaataaatgattaaaatatatttaatgtatgataatttaagagttaataaaaagttttattggatatttttagagattaagataggaattgattattttgaaatttgataaagagaaagaaacgagaaagaaaagaatgaagagaaatataaatgaggaagaagaaagtaatgaggatagatacgagtagtgtgaggttagatgtaggaaaggcggtttaaagtttgaggttaagttaaggaatttaggtattagggatttagaggggttgggttgggtgggtcgttgatttgggtattgacgtttatttgttttgtgtttagtagtaggttgattatttttaagttttcgattttggttgcgtggtggaggtaggtggaatcgttttttttttgagggagatacgggtaaatgagtttttgggttggtattttaaatttggtttttgatttcgggggttacgttttgttgtttgcgcgtatattttgttatagatatagttattacgttgtattatgtaacgggttatttttaggtggttgtttattacggtttttattagtggcgttcgttgttgtttgtttattgtatttatgttggttttagtttgtgagggggtaggagggttggtattagggaggtatggggtaggggaggggtttaagggtttggtgaatgaggtatggggtcgggttcgtgttgatttgtagtagtatatggtagatttttacggagtttttttgggcggttgtatgtaggggcgtgcgtttgttttgttggtcgttttggaagttggggtttaggttgtttattgcggggagagttcgttatatcgggagagggagggataagtggtaagtaagttagggggtaggtggtattttttttaggaaggttttttagggttttaagttggattagggttttttttggtatttttcgagtttgtttttattatagtatttattagaataaggagttaaaggtattagttttgtttgaatttaaattttgttttgttttttagtattattgtgtattgtgtaaggtttttaatttttttgtgtaagttaaggttaataggtataagtatttagaataggatttagtatttatgagttattatatttttatcgttatgggttatatgtgttttttttttattatattaagttttttagggtaaggattgtgttttttacgattgtatttttggttttgtatttagtgtttggtatatatatgaagtttggttaaggtttgttgaaggaatgggtggtatttatatagtattaggattattttttgtagttcgttttgttttacggataggtataattgtcgagggtggaaacggagtttttttcgtttgttaagggagtacgggagcggggagagaaggggagttttttagattttagtattagtttcgatattatttttttggttttagttttagttgttgtgtttgagtaattttttatttatttttttgatttttggatgattagggttttttttagggtttttcggtttggttttagtggtagttttacggttgaaaggtagtttttattgggtagggttagggagggttttgagttgttaatggtgttagttaggggatcgtagggcgggcgtcggggttttttatgttttcgtattcgggtattgtggaagaaggagtttatgtttaggagtaataggggtgggggagggaatagatagtatagaagggggaggttagtatttgggttgagaagtgtttgttttttcggggatattttgggataggggtgggggtgtaggagttgtagtgtcggtcggtggggttatttcgttatttcgggggatggttattttttgagttttagaagtattttttttatagtggggatagaagattattttatttagttgagatatataggttttgtggaagcggtgggttatacggaagttagggtggtattttaggaaggtgttttgggagtagggaaataatatggttaggttattggggttttttttgttatagggtatgttatttgtttgttttattggttatttatcgtcgtgtagaagtagtcgtagttcgggtagtagtggtgtttgattatgcgggcgcggtgggttttatagagtattattagggttatacggttggatggttttatggtttttcgtttgaggatggcggtattgtagtttgatagttgtgcgtagtgaggatgggtgagaagagagcgtgaggttggggtcggggattggacgttttggtattttttttattagtttacggttttattttttcgtttatatttttagtggttatgtatttgtgtttcgttttttcgttgatgcggttaattttgggtgtttttatgcggtagttgtataggggtaattttttaaattttcgttttgtttttagcgaagatgtgttattggatattttttggatggaggaaaagaggagttgagggaggttttgtattttatttattgggatttttggcgggtttttttattttttttttattttatttcgttatgttttagaatttttaaagtttggttatggatatttcggttttggcgtggttttttttttttttttttttttttgttttgaggtcgttttttagtggttttttgtttcggtaattggtaattattagcgtggttgggggagagggttttttcgttgggtagttttagggattttagagggatttttatgtatttattggggtttgaggagtttatattatttatttttgatatagagatagagagagtgagagtgcgagtttataggtgtttggacgcgtgggtatatgtaggtggatatgcgagagcgtgtgtgtgcgtgtatatattttggggggtcgggcgggggttggagggtatttaaaagtagtagagtttttttatttcgtggttttttggttcgcggaggttttcgtttgcgtcgttttcgagacggttttatttatgggttgttttttcgttatttttttttggttttgcgtcggttattggaattattttgggaagggggaggaggaggagttaggaatttttatttttaggggtttttttaatatttttaggattagatttttagttttatagttttttatttttttggagatattagttttcgttttttattttatttgattgattttttgattttttattttttttttttttttttttttttttttttttttttttttttttttttttttttttttttttttttttttttttatttagttgtttagttagagttttaattttagattgggagagaggtagaatagatatatttaatttttaggatttagataatgaggtgagtaaagaaaattattattattattgtttttcgttattatttacggatggttgttggggataagtgtgggtagtagaggagataaagggttatataaagagagggtgtatggaatattatatagtagtgaaaaagttatagatagtaatgtgtatagattttggtaatgtgatattaagttaaaaaataaaaagtaagtattagaagataaatatattttgatattttttttatgatgtttataaataggtaagattattaatggttgttaaaaatattagatataaagtttatgagaaattttatatgaaaggtttaggttgatattatttgaatttattggttaattttattattaataagaaaaatgattagattagatgttttatgtattttgatgtgatgtggttagaagtatttgtatttattgttaagtttttttggtatttgaagttgatttcgtttttagatttattagtttataagaaatatgggtagagaggatgtgttaatttttatttaattagttaatttttaaatgtgaaaaattttgtaggataattgagttggtttttttgataaataaatggtaaaaaaaaaaaattttttttatttatttattgagttttgtttttgttgtttaggttgtattgtaatggtgtgattttagtttattgtaatttttattttttggatttaagtaatttttttgttttagttttttgagtagttgggattataggtattcgttattatatttagttaattttcgtatttttattagagatgtgtttttattatgttggttaggttggttttaaatttttgattttaggtgatttatttgttttttaaagtgttgggattataggcgtgagttattacgtttgggttaaaaaatttttttttagaagatgaggaaattaggttaggtgtggtggtttacgtttgtaattttagcgttttgggaggtcgaggtgggtagattacgagattaggagtttgagattagtttggttaatatagtgaaattttgtttttattaaaaatataaaaaattagttgggtatggtggtgggtgtttgtaattttagttatttgggagattgaggtaggagaattgtttgaatttaggaggtggagtttgtagtgagttaagattacgttattgtattttagtttgggtgatagtgtgagattttattttaaaaaataaaaataaataaataaataaatataaagaagatggggaaatttaaatattgagagagatttaagataaaaaaaaatttttttttttttgagacggagtttcgtttttgttgtcgaggttggagtgtaatggtacgattttggtttattgtaatttttattttttaggtttaagcgatttttttgttttagtttttcgagtagttggaattataggtacgtattattacgtttagttaattttgtattttttttagtagagacggggtttttttatgttgattaggttggtttcgaatttttaattttacgtgatttgttcgttttggttttttaaagtattgggattataggcgtgagttattgtgtttggttgatttaagataaatgttaattaaattaaggtgtgggttttatttggattttgataaaaattatttgtgagagttgaggaaatgtgaagattgataggatatttgatggtattaagaaatcggtaagtttttttaggtgtgaaaatagtagtgtaatgatgttgaacgataaaaagaggttttatatttataaatttatatggatatatgtttaggtaaaatgatatgaggtttgggatttgttttaaaataatttagtaggtgtgtgtgttgggagatgtatagatgggttaagatggattgtgtattgataatggttggagttgtgtattgggtatatgggggttttttattttatttttttgattatgtttgtaagtttttatgataaaatgttaaataaaaggtaaaattagagagattaaatattttattgtgtaggtaaatatataagataaaattagataaagagtaacgaaataagtaaataaatgataatgtaatgtttttgaattttatataaatagtataacgtatgttttaaaaaagtgttttttggttatttttttttttgttttttttttttaaatagtatatgtttgttaaatggttattttattagttgattaaaaaaaaaagaatattaaattttatgtgtagggtggtggttatttttgtggatgaaacgggtagaatatatattgaaaatgagttatagttgggcgcggtggtttatagttgtaattttagtattttgggaggttaaggtgggtggattaattaaggttaggagttagagattagtttggttaatatagggaaatttcgtttttattaaaaatataaaaattagtcgggcgtggtggtaggtgtttgtaattttagttattcgggaggttgaggtaggagaattgttttaattttggggatagaggttgtagtgagtttagatcgtgatattgcgttttagtttgggcgatagaatgagatttcgtttttttttataaaaaaaaggagttatagatagtatggggtaatgatttagtggatatttagaagataaaaaggatagaaagtagaaaaatagggaataaggaggattggatagtgagttttagttttgggggagtatcggtggggagggtagattagttttgttttattttgttgtcggagtttacgcgtttatttatagagtaggaattatagtagagattgaagttattatttattatcgttttttatttttttagggattcggggttttttttcgttagggttattttttttgaacgtcgggtagaatttaattttttcgattagaaaaagattagaaaaattgaggttattgatattttgcgtatttttattgaggatgggatgtagttttatttttgatttttttttagagtagttttcgaggggtagaggttttgtttttgttgtttattaggttattttttgagtttagttttttttttttggttagatttggaagaagagagagaatggtgtggggtttattatcgaaatttttagaatagattatattaagttatcgggggtgggggatgggattgatttgaggttattttttttagtgagtggatattattatttatgcggaaatgttgtattttagggggtcgttttttagggatcgggggttgtgggtcgagagggagtatattgagggttagagagtatttatagttttgtttgggttagtttggagttttaggcgggggtggggtagtgagttatatttttaaatgttatgtgaggttttagtagttataaattggtaattacgggtgttatttttttagaggaagagtgttaagtatattaatatttatttatttttgtaattatgtagagtaggtttttttttattttatagatgagaaaataaagtttaataaagttaaaagattttttatatgtggttatatatatagtaggattgtttataatagttgaggtgcggaagtaatttaagtgttattgatagatgaatggataagtaaaatgtggtatttatatataatggaataatatttagttataaaaaggaaagatatattttttttaagagataaggttttattttgttatttaggatggagtgtagtggtatgattatggtttattttagtttcgaattggatttaagttatttttttgttttagttttttgggaagttgggattataggtatatgttataatgtttaattaatgtttttttaatttttttttttggtagagaagaggttttgttatgttgtttaggttggttttgaatttttggtgttaagtgattttttttagaaagtacgggattataggcgtgagttattgggtttggtttttgaaatatttttttaaattttttttagagatggggttttggtatgttgtttaggtgaaaggaaagaaattttgatatggtataatatagatgaattttgaggatattatgttaagtgaaataagttagttataaaaggataaatattgtatgattatatttagataaagtatttatttaaatttatagagaaagaaaggatagtggtttttgttaggggttagggggtggagggaatggagagttatgttttaatgggtatagagttttagttttataagatgagttatggtgattgatgattgtatatgatgaaagtatttaatattattaaattatatatttaaaaatgttttttattttatttttaaatttttagatggagttttattttgttgtttaagttggagtgtagtggcgtaattttagtttattgtagtttttattttttaggtttaagcgttttttttatttttgttttttgagtagttggaattataggtatatgttattacgttcggttaatttttgttttgtttttttttttgagatagagttttgtttttgttgtttaggttggagtgtaatggtaggatttcggttaattataatttttgttttttggatttaagcgatttttttgttttagttttttaagtagcggattgttataggtatgtattattatgttcggttaattttgtatttttaatagagatggggttttattatgttcgttcggttggtttcgaatttttgattttaggtgatttatttgttttggttttttaaagtgttgggattatatgcgtgaggtatttcgtttggtttaatttttgtatttttagtagagatagggttttattatgttggttaggttggttttaaatttttgattttaggtgattttttcgtttcggtttttaaagtgttgagattataggcgtgagttattgcgtttggtttaaaattgttttttagatggtaaattttacgtgatattagtttttttttatttagtttattagtagtgatggtggtatattgttagaattgtgttattttttttgagtttcgttttgttgtttaggttgaatcgtagtggcgcgattttggtttattgtaagtgatttttttgttttagtttttcgattagttgggattataggcgtacgttattatatttggttaatttattattattattattattttagttagagacggggtttggatatgtttattaggttggtttcgaatttttgattttaagtgattgtcggttttggtttttgaaagtgttgagattataggtaagttacgtttggtttattgttaggattacgttattatgttattattgttgttaattttttattgtatttaatttataaatttaatttttttttttttttttattttttataaaatgaattgtaattataaaaattaatgtttattatagtgagaaaggaaaggtagtttatagtaatttgtgttatgtgaagtaggtaaaattgattaggtttagcgagaagttagtatggaacggttagggtttatgtttggaggtaattgtttaaaggtattttgtatttgattagggtgttgttttatttattatttttatgtgtttaatatttgtgagataaagaataatgtatagtagattaatagtttgttattttaatgtaaattggtaaataatttaggaattgttttttttttttttttgttatttttttaattttttaaaaaatttttatttttttttttttttttttgcggttttttttagagtagggttaatttttacgtagtgtgtttagagttagtttgtttttttttaatatttttacgttatttaattttttttttttttaaaaatttatttgtgggttggttgtggtggtttgtatttgtaattttagtattttgcgaggttaaggtaggaagattgttgaagtttagtagtttgagattagtttgggtaatatagtgaaattgtttttaaaaataaaataaaataaataaaaaaatttttatttataattgttgttaattagagtgtatttttacggtaatttgaatttttgtttttaaaggttgtttttaaaatttgattaaatatattttatttaatgttaagtttgttttagtttttttttttaggttaataataggtatgatttaagaattttagaatttggttataaagtttttggtgtttttgttattttttttttttattatttttgtggtttttatttttttttttattgggatttttaggaaaaattttataaatagagtagtgatagatgagttttttaagggtttgttttgaggtagaaaggaagagtggtttgaaatttttttattttgttattattataagagtaattaagatattaattatataattgattttttaatattaaatttttattatttaagaatgtaaattgtaggaagagaggaatttgtttgttggtttatagattaagtatagtttaatatttgatatatagtagttttttgtttaaatatgtgaatgagtaaatggagtagaagttttaagtgaaattgtaaaagagtttattaaaggtttatggttgattattttattttttttattttatttatttgtttattttttggtttggatatggttttgcgggttcggtggattttgggttgtttttttgggttcgtggtggttggagggggtttagattttgttgttgtagttttttgggtttttggtatatttagtagttttatagttaaattttggatagatggaggtgattttttcgtttttgttattgatattttggttcggttaggataggaattttttttgttgggggaagaggggaatgattttgtggtatggtttagaaaataagtaagtaaaaggtaagataagaaagaaggtaagagttagaaattttttattaattttttaggttatttagttttttatttagtaggattcggtttttacggaggtttttattttttttaagatttttagatttatttttaatgagtggtgtagtttttataggggtgttagtttttttattattaatagtgatagtgatagaggttggagatgaggggttagtaggttttagggagtcgggggtggttttgggtagggtttttttattacgaggggtgttttttaaagagttatgaattgtagaggaagagaaaaagtttagagttaagggtttaggagattttgtgtttagggaaggtgacggtttaattggggttcgttttagttgtatttatttttttcggtggtttttttggtttttttttttagtagtagcgtttttattttagcgggggtttttttttgggaggggagataagggataggagggttggttagtttagtagagagttggggggtttaggatgtttgggttttgggaagagagagtaggtttcggggtttatttttttttttgtggggtttttttttttcgcggtttcggttgttcggaggggtcgtacgatttttttttcgggttcgtattaattttttttttttcggtagatttcgtatttttggggtcgagagaagaggagggggagggggcggggttttcgcgtttcggtttcgtttttttttttcggttgtacgcgtcgttttttttttgttttttaggtcgcggggatttcgggtattaatttttttagtattcgttgttttttagttcggtggacggtttttcgtgttttttacgcgtgtttttggggtttcggcgttcgtcgtttatttaggggtagtcggcggttgtacgcgcgttttcgtgtttattttttttattttttatattttggtttttttattcgttttcggtgttggttttttggattgttgtaagtttcgttcgggtttttcggtttcgttgtattttcggagtattgtacgggcgcgcgtttttttcgggcgcgcgcgcgggtatgtattcgttttttttttttttttttcgtatttcggcggtcgtcgtcgttgtagttttcgtcgtcgtcgttatcgtcgtttgcgttgggggtcgagtcggcgcgcggtcgtttcgggttacgtgggcgagggagggagggcgaggaggagttttaaaggagtcgttatatgttttttggttatttttttttgagagcggtttcggagatggttgtgattgttttaagttgggagttgtaagggagaatttttgttatttttggttttagttttgtagggatcgagggcgagatacgtttgggtttaggtgtggcgtttttgtttttatttggttttaggtaataagcggagtttttgaatttttcggttttcggtagcggttgtattttttttggtttggttgggtttttttcgtttttggttgtttttttgtttttttagtttttgggttattagatagaaggtttggttttagttttggtttcgtttttttgttttttttaacgagtacgaaggggcgatagggacgcggaggatatttttatttttggttggttttagtatgttgttttatgttttttggagtagcgtgtttttttgaaaatttgtggttaaatgttttttttgtttatattaggcgtgttatatttttatacgtattagggatttaggtaagtttagcggttcgaacgttattattgattggtgatattgtagtaagtaaattttttttgtcgaatattttataagtatagttaggtatttcgtgggttatagtttagcggataatttaagtataaatgatatatattaagatagataatttcgatagttgtatttagggtattatttttttaggtattacgttttggtcgagtttggaaaagatttgtatgattttatacgtagtatttgatataggtaggtggggtatttgaggttaattaaaggttttttgggaattgtagttttttttggttaattattttagagttttttgggaattgtagttttttttgtattttaatttaaatttagttttttttttttttttttagtttttttgaagatatgatttatttattttagataaaatatgattaaatagatttttgtttataattttcgtgggtaggttggttatttgtagtttatttttagtattgattttaagttttttaaatagagtttatgtgtatttttacgattgttaattatttgtattgtgaggtatttggttaagtgttgagattgtagaattggtggagggttgggggtggggatttgggggagtttttgattagaggagtttatttgttatattttttttttatgtttagggttgggtttttttaggtaagggatatgtagagttgtgatttttaggtattaagaacgtagtattatagggagaggttgtttagggtaggatagttatgtatacgtagttgttagagtgtaaaggaaaaaaaaaagtttttttttgttttttattttgtggaaaataaaagtagaaaaattaaaattttaaattttagaaaaaattttaaaaaatatgtttttttttaaaaaatattgtatgtttttattttttttttttttttttaatagttttttttgtgtttttttttttttaagtgttttattttttttatttttatgattatttattgttttttgttattgtatttttattttttaatatttatttaggatgcgtattttacgtttttttatttggcgttttattttgtttttttttaaattttagtaagttttatattcgtagttttatttttttagtatgtaagaattgttttttatttttttttttgggatttagtaattttttttttttattatttttttattttaggtttattttaagtaggagtatgtttttttgttaaattttttttttgtttttatttattttttaattttttttatttcgagaaatgttagaatttttttttgggtagttttagttaggaataaaatatttttgtttttttttattttataggatttttttttttttttttatatatatatgtatttttaagagaaggaaatttttttttgggatttcgtatttttttggtttttaagaattttttttttagttttagatttttgtatttttaagagtaagtttttttaaggaattatttttttttttttaggatgtgtgtatttgtttagttttttatttttatttttttgttttagattttttattttttaatttttttgggttaaagagttttttttttacgtagtttaggggttttagttttttggtttttacgtttgcgcggttagcggatgaggacgttaatttcggttatattggtttttagtacgttttcggtcgtggttttgtcgtgttgttttttgaggtgtcgtttaatggtaggtttgtgggcgaagcgtacgtcgtagtaggagtagcggtagggtcgcgttttcgagtgtaggttgaggtggtcgtgaagggtggatttttgtgtgaagtatttgtcgtagatgtcgtacgagtgtgatttgatattacgatgtacgtttatgtggcggttgaggttgttgttgtggttgaattgtttgttatagcgagggtatatgaagatgaagtgttgcgttcgtatgtggaagattagtttttttacgttttggaatattttcgggtatttggtgtatttgatgttttttaaggggtttttatttgagaagtttttaggtaggggttttcggttgtttttcgtttttaggttgtttttcgtttttcgggtagttatggttatcgttgttgtttttattaggttcgaggtggtttttacgttggttcggttttcgggaattaatagtaggttttttttttttgtatttttcgataggttatagtaggtttttattatattttgcggtggggttatagtgttggggggaacgttgttttgggttagttttttaaggtggttatttacggagtttttaatgtttagatttttttttaggtttttagggggtttgagtcggtgtgttatttttagggtcgattttattttgacgatgtagatgttagatacgtttttatttttatttttattttttttttcggtttttagttttaagtttttatttagtgggaattttagttttattggtcgtaggagtggagggggtagaggaggtgggggtgggggtttcggggttggttttggggttttggttggagggaggagggatttggtggcgttgatgttgtttataaggttagttttattgattttattttttttgaggtttattttgggtttaatgaattggttgagggtatttcggtatttttttattacgtgttttatttgtaggtaggaggcggttgtaaggtagttgacgatgtttttaatagcgaattttaaggcgttcgtgtagtaggagaggagtaagtcggttacgatgcgtgtattgtgtattagggagatttgtagtttcgagttggggtttagtaggaattggtttcgtaggaagggtgagtaggcggttaagatgattttgtggtttcgaaatttgaggttgtcggttataatggttacgtcgtagaatcgtttttttgttcggagttggtttatgtttcgtagcgttgcggtttcgtggtcgggtagttggaagcgtaggatttttattttagaggttattgtggcgggggtgggtaattttggttgggaaggaaatcggttagagataaaggtttttggtttttcgaagttaaggttttaggattttcgtttttatttttgtttagtttttcggtattcgatttttcggtttttagattttttttttagtttttttaattttggggaggtgttgtttttttgagaggagggaggcgtggttttcgggggcggggtagcggcgtttatattttttagtttagtagttcgttaggatggggcgagttcgcgcgtttacggtggaaggacggagaaaaaggggggttagaggtttggggttttggattttaaggtggtttcggttgtaggttttttttatttcgttttttttatcggttgttttattttttcgttttttttttatacgtttgtacgcgttttttacgttttttttttcgtcgttagtacgtatcgtgtacgttttgtttttacgtttagagtttcgtggtacgtttttttagttttacgattttgagtgtacgttttttttatttggttcggtttcgcgcgttgtttttttaattttttattttttttattttttttcggggtcggtagcgatttttatatacgggtagggtttgggtagcgcgtaggcgcggggatgtacgggacgcgcgcgcgcgcggggtcggtttcgcgtgggcgtaaggggggaggggcgggggcggttcgtgtcgtgtgttttaggtttcgcgcgcgcggcggcggcggcgtcggttaggattcggggaggaggaagaggggagggaattaaaggagtaggatttttttttttcgatttttttttttttattagtatttttacgcggttaaagggtcggacggttttgttttttttttggtcgggattatttgttcgttagagcggaaatacgttttatatttttttttttttcgtttttttttttttgtatttttaagtttcgcggttagtttgcgcgtgcgtgttaagtgtcgcgcggaggttcgtttattcgggttcgttttttaatttcggttgtttatggcgttattcgtttcgcgttttcgcgtttcgttcgcgtcgtatttcgtagcgcgcgcgcgtattcgttttttcggttgcgggcgttgttatttgtttttaggggtggtgcgttttcggtttagttgtgtcgagcgttgttttgggtgtattcgtggtattttttagggttttattcgtttcgtggttaatagagttgttggtagttattatttacgtttgttttttttgttgagtgtgtttatagttgttttagatatatttttaggtttttttaatttttgtaaagttagtaatcgttttagttttttaggtttgaaatatgattttattttttataaagttagacgatttagtgtttttaatttttttttattttatgttagttttttaaaattatattcgtttttttttttatttttaggattgattttaattttttgttaaggtagtcgtttttcgtttgtgttatcgatgattttgtttattttatttttagtatataattaattttaggattaattttaatgatgtgatttattatgttagtatgattttattttaattttttatcgtttcgttttttttattttttattttttttttagattgataaggtttagttttaaataaaatttttttttaatattgcgttcgggtttttttttttttttgttttttttagattaagttatagtttttatagttttagcgatagtatttaggagcgttttgaaggttggtgtttttttttttattttttcgtatttatatttatttttttatttatttaagttcgcgtgaagatgttattgttttttgttaattggattttttttttacgttttttaggagattagtgcgttttttttatattttaattttgatgaagttttttattatgtgtttaatatttggtttttttattagattataaattttttggttgtaggaattatgttgtgggttttgttttgtaaataaaaattatgtaatagggagggtgtggtggtttacgtttgtaattttagtattgtgggaggtcgaggtaggtggattatttgaggttaggagttcgagattagtttggttaatatggtgaaattttgattttattaaatatataaaaattagttggacgtggtggtaggtgtttgtaattttagttattggggaggttgaggtaggagaatcgtttgaatttgggaggtgaaggttgtagtgagtttagattgcgttattgtattttagtttgggcgatagagtaagatttttttttaaaataaaatattaaaaaaggttatgtaataaatgattgttgaagtaatttttttttggtttagttagtatttatttataaaaagtttgtttttgagttgaaattgaatttttgaatttaagggatgttgtttggtaggagggtggaggtagcgtagatagtgtttaggtggtattttgattttttgttttttttttttaaattttttgatttgtatgttcgtatttagttttttttgttgaatttaagagtttgttttaaattgttttttttgtatttaggttttgtagatttgaggaagaatatttgattttgtgttagacgtatttaggtttaaagttatatttttaggagtttttgagtttattttggtttagaaggttgttagattcgtaaattattaaaaaaataaaataaaagttttatttttgtattaaatgaggtttattgggtaagttatttaattttttgaattatagtgtttttatttttgtttttttcgtttatttttagtttatttgaaagtatttttattttgaaggttttgattttttatagggttaatgtgaggtttaaatgagtttggtatgtagtagttgttgagtaaataatagttttgtttttttttttttaatttgggaaacggattatgaaatttttaaaagaattttattttattttaattaattaattaatttatttagttggagttttgtttttgttatttaggttggagtgtaatagtacgattttggtttattgtaattttcgttttttaggtttaagtgatttttttgttttaattttttaagtagttgggattataggtgttcgttattatgtttagttaattttcgtatttttagtagagacggggttttattatgttggttaggttggtttcgaatttttgatttcgggtgatttattttgtttagttttttatagtgttgggattataggcgtgagttattgcgtttgatttaaaagaattttaaaaattttgtttttttattttattttttttttttcgtattgttaaattttttagaagaatagtttatattttagtgagagtagaaatataaaaagttgttaagttaagaattagagtttgtaaaattttgttttttgttttttttttgttattttttttttttaggaatgtagatgggatagggggtttaattttagtttatggtttaagataggtagtttttggtggtaggtggagttgatagttaatgaattttttaagtgtttagtttatttagttataattttgcgtaaaaataagtagaggtgtataaatttttttttatgtagtttggtggagagatgatgtggagttattttttatgtattttatttagggggtttataattatttagatttttgtttttttttttttaatttttgttagtataaaattaggggtttttttgtttttagtttgtagtattaaatgttttggtgtggtgttaagaatagataaatttaggagatatttttaggatttttgggttaggtttaatggtttatttttgtaattttagtattttgggaggtcgaggtaggaggattttttgagtttagtagtttgagattagtttgggtaatatagtaagattttatttttataaataataagaaaattagtagggtatgatggtgtgtatgtgtttgggattttagttatatgagaggttgaggtgggaggattgtttaagtttaggtagttgaggttgtagtgaattatgatagtgttattgtattttagtttgggtaatagaatgagattttgttttttaaaaaaaaattaggatttttagtgagttttagaaataaaatttgggttgggtattgtggtttatgtttgtaattttagtattttgggaagttgaggtgggaggattatttaaggtcgggagtttgagattagtttgggtaataaagcgagatatttgttttaaaaataataataaataaaagtaaatatattttttaaaggaaataaaatttgattagggatgtaaggaataattaggagataaaaggtttaggttttagtttattttgaagttattaaggttttttaggttttagtattttttttaataaaatggagggattattttttgaagtattttttagttttatgagtttatagtagtttattttgaaaaggggtgtttatgtttgtgggtatttttgagagaagttagtttatagtttagagtattatttttggttatttatagaggtaaggagtggttttgataatttaaaatcgtagtaaatattggatatttgtttaagatatttaaagtattttaggttgtgggtttattttttataacgatgtttagtacgtattagaataattatattttttgagtaatttataggaaaggaagaggtaagttagtttggatttttaaatttataggttgatgaaattgttttatattataataaaatttttaattttttttttttttttttttgatttgtatttagttttgtttttagcgtaggaattttggtaaaaattgtaggatgttttggtaatgttggaaggggtttattgtttggggaaagaagttatgtgaaaataaagtgtttgtattatttttatttatttgtaaaattattttttttgaatttttatttattttttttgattgttttttaatgttggttttttttttttttttagagttttttatttttagtttttcggagtttttttttagttttaatttgtttttagataaattttttttttttttttttatttcggagggaatttattttttgtagtttattatttttgttatcgtttaagttttttatatatttttgttgattttgtttagatttaggtttatttggggaaatggaggtagatttttttagtattttgtgaattttagatagaaaaagatttttttatttttcgataaatattttattttttgagttttattaagtttgttttgttattttatgttatttttgttgtttgagtaattgattttcgggtttgtgatatttgtttggattaggttgttttttttaggtttgtttgtgtttttgtaaatgatttaatttatattttaagtttaaaaaaaaaattgtttattttattttttttatggagttattcgtgagagtagaaatataaaaagttgttaagttaagaattagagtttgtagggtcgggtgtagtggtttatatttgtaatcgtagtattttgggaggttgaggtggtcggattatttgaggttagaagtttgagaatagtttggttaatatggtgaaatttcgtttttattgaaaatgtaaaaaaaattagttgggcgtggtggtgtatgtttgtaattttagttatttaggaggttgacgtaggagaattgtttgaatttgggaggtagaggttgtagtgagttgagattacgttattgtattttagtttgggtgataagagtgaaattttgttttaaaaaaaaaaaaaaagtaaaataaaagtattagagtttgtaaaattttgtttataaatttaaaatttaaagtttaaaatttaaaatgtagttttgtttaaaatttaaaatgtgtaagtataattttaaatttaaattgtaaagttttgtttaaaatttaaaaaatataagagggtataaggttgggtgtggtggtttacgtttgtaaatttagtatttttgggaagttaagggaagaggattatttgaaattagtttgggtaataaggtaaaatttagttttagaaaaaaaaaaaatagttgtgggaggtggtgttgtttgtggtcgtagttatttaataggttgaagtgggaggattgatttagtttagggaggagaaggttgtagtgagttttgttcgtattgttgtattttagtttgggtgatggcgtaagattttgttaaaaaaaaaaaaaaaaaaaaaaagtggttttttttgtttaggttggagtatagtggtgtaaagaaggtttattgtagtttcgatttttttggattaatttatttatttattttttagatagagttttgttttgtcgttaggttggggtgtagtggtataatttcggtttattgtaatttttatttattaggtttaagtgatttttttgttttagtttttggagtagttgggattataggcgtgcgttattatttttggtttttttttttttttttttttttttgagatggagtttcgtttttgttgtttaggttggagtgtaatggtataattttagtttattgtaatttttgttttttaggtttaagtaatttttttgttttagttttttgagtagttaggattacggacgtttgttattacgtttagttaatgttttgtatttttagtagagatggggttttattatgttggttaggttggttttgaatttttgattttatgattcgtttattttagttttttaaagtgttgggattataggtatgagtcgtagtattcggttattttttttttttttttaattaaaagtggtaagattgggttttttcgtgttgtttagttattgattttgaatttttgggtttaagtgatatttttgttttggttttttaaagtgttgagattataggtatgagttatcgtgttcggtttagataaatttttttataaaagttagagttagtagatatagtaaattttattgttgttttattttaagaaattgttggttgggtggggtgatttatttttgtaattttagtattttgggaggttgaggtgggcggattatttgaggttaggagttcgaggttagtttgggttaatatggtgaaatttaatttttattaaaaatataaaaattagttgggtgtggtgggggtgtttgtagttttagttatttgggaggttgaggtaggagaattgtttgaatttaggagatggaggttgtaatgagtcgagattgtattattttattttagtttgggtgatagtatgagattttattttaaaaaaaaaaaaaagaaaaaaagaaattgttaaagttattttaatttttagtaattattattttaattagttagtagttatcgatattaagataaaattttttattagtaaaaatgttataatttattaaagatttagatgattgttagtattttttagtaatatagtattttaaaattaaggttatatatattgtttttagacgtatgttattgtatattgaatagattatagtatagtgtaaatataatttgtgtgtattgggaaattaaaaagttgttgatatgattggttttattgaggggatttggaacgaagtttaaaatatttttgaggtatgatcgtgtatattttatttgtttattgtaatagttttagtatttatgtagttgtaggttttttcggatagtttagttttgtttgtttgattattatatagatgaattatattgtatatgttttggggttggtttttttatttaatattatggttttgttgatttgtgtagttgtaatttatttattgttttttaattggatgtttatattagaatttgtttgtatatttatttatagtttttttggatatatatttaggagtggaattgttggattatatggtaattatatgttaaatttttaacgtattattattattatttttttttagataggatttttgttgattagattggaatgtagtggtgtgattttggtttattgtaatttttattttttaggtttagtttttcgttttagtttttcgagtagttaggattataggtatgtattattatgtttggttaatttttgtatttttgtagaaatagggttttattatgttgtttaggttggtttggaatttttgagtttaagggattcgtttgttttggttttttaaattgttgagattataggcgtgagttatggtatttgttttttcgtttatttttttttttttttttgtagagatgaagttttgttgtgttttttaggttggtttcgaattgttaggtttaagcgattttttagttttagttttttaaattttttttagtttgggattataggcgtgagttattgtgtttattttatatgttaaattttttgaggaattgttaaattgttttttatagtagttgtattattttatgtttttattaggagattgtatataagttttaatttttttatatttttgttaatagttgttattttttgtttttttttgttttttgtttttttttgagatagcgttttattttgttgtttcggttagagtatagtggtgcgattttggtttattgtaatttttgtttttcgggtttaagggatttttttgttttagttttttgagtagttgggattatagttacgcgttattacgtttggttaatttttgtatttatagtagagatggggttttattatattggttaggttggtttcgaatttttgattttgtgattcgtttattttagttttttaaagtgttgggattatagacgtgagttatcgcgtttggtttgtttttttttttaaatagatattttagttgatatgaagttgtatttattatagttttatttttatttatttaatgattaatgatgttgagtatttttttatgtttttgttggttatttgtgtgttttttttggagaaatatttatttaagttttttgtttatttttttttttttgataaggttttattttgttgtttaggttggaatgtataattatgatttattgtaggtttgatttttttaggaataggtgatttttttattttagtttttagagtagttaggattataggtatacgttattatatttagttaatttttgttatttgttgtagagatagggttttgttatgttgtttaggtttagaaggtttttaagtataaaatgtattatattaggataatgttttgggggtagaaatagaattatgaaaataagaatttagaagaaatagaataatgtgaaatttttgattgttaaagaagattataattatgtattttaaaaatgaattatgagtttagtacggtggtttacgtttgtaattttagtattttgggaggttgaggtagatgaattatttgaggttaggagtttaagattagtttggttaatatgatgaaatttttatttttattaaaaatataaaaattagttaggcgtggtggcgtatgtttgtaattttagttattcgggaggttgaggtaggataattttttgaattcgggaggtagaggttgtagtgagtcgagatcgtgttattgtattttagtttgggtgatagagtaagtttttattttaaaaataaaataaaaaataaataaataaaatgaattgggttgggtgtggtggtttatgtttgtaattttagtattttgggagattaaagcgggtggattatttgaagttaggagttcgagattagtttgagtaataaggtgaaatttcgtttttattaaaaatacgaaaattagttagacgtggtggtaggtatttgtagttttagttattcgagaggtggaggtaggagaattgttggaatttgggaggcggaggttgtagtgagtcgagatggcgttattgtattttagtttaggagatagagggagatttttgttttaaaaaataaataaataaatatataaaaaaaaaaataaaatgaattatgaagggaatggttaaaaagtgaaataagattttttaaaaaagatttatgtttataatatattggaatggtatttttttgtaattaaatatttggggaaagttttagatagtagtataaaaatatgtaaggggtatataatttgtaaaatttttttaatgtgagtaaaagggtttgaagattatatgttttttgaaattagtatgtatatgagttatttggagttttaattcggagtttgagttagtaggtttgggtggggtttgagattttgtgttttttttttttttttttttttttttttttttttttttgagatagagtttcgttttgttgtttaggttggagtgtagtggtatattgtagttttcgtttttcgggtttaagtaatttttttgttttagttttttaagtagttgggattataggtatatgttattacgtttggttaatttttgtatttttagtagaaatggggttttattatgttggttaagttggtttcgtatttttgattttaggtgatttgttcgttttagttttttaaagtgttgagattataggtatgagttattatgtttggttttttttttttttttttttttttttaatttgagatcgggttattacgttgttaaggttggtttttaatttttgggtttaagcgattcgtttattgtagttttttaaagtgttgggattataggcgttgagttatcgtgtttggttagattttgtatttttataagtttttgttgatgttgatgttgtttgtttgtggattatagtttgagtagtaagtatttatatattcgtaagagtggagttgttggatgttgaggtttgtatttgtttagtttttttgttaatgttaaattattttttgaagtagttgtatattagttatgagattgttgttttttgggaaaaaagatataaaggttttaaatttaatggatattatttagtgttttttttatttgagttttttgtagtttgtgatatatttgattatattgtttgatttattgtttttttttggtttttatgatatttttgtatttaggtttttttttttttataattttagtttgttttataaatttttattttttttttgttttgatttttttttttgttgatgtttttggttttttaggtttttattttattttttttgggtggtattatgtgttttttagagattggttattaggtcgggtacggtggtttatatttgtaattcgagtattttgggaggttgaggtaggtggattatttgaggttaggagttcgagattagtttggttaatatggtgaaattttgtttttattgaaaatataaaaaattaattagggtgatggtgtgtgtttgtaattttagttatttaggaggttgaggtaggagaatcgtttgaatttgggaggtagaggttgtagtgagttgagattatattattatattttagtttgagtgatagagcgggattttattttaaaaaagaaaaaaaaaaaaaaagagagattggttattatattgatgattttgtgatggttaattttatgtgttaggttaagcgtagtggtttacgtttgtaattttagtattttaggagggtaaggtgggaggattatttgagtttaggattttaagattattttgggtaagatggtgaaattttgtttttataaaaaaaaaaaaaaaaaaaaaaaagatgtgttaatttggtaaggttatggtgtttttgggtattgtatatatatatatttgtattattatttattttaatgagatagatttttattatgttttttaggttgaatttgaatttttagttttaagtgatttttttgttttagttttttgggtatttgggattataagtatgttattatgtttgattgtagtttggatattttagtgagggtattttgtagataatattgatattttggttgggtatagtggtttacgttagtaattggagtattttgggaggttaaggtgggtagattatttgaggtgaggagttcgcgattagtttggttaatatggtgaatcgttatttttattaaaaatataaaaattagttgggtgtggtggtaggtatttgtaattttagttagttgggaggttgaggtataagaattatttgaatttggaaggtagaggttatagtgagttgagatcgtgttattgtattttagtttgggtaagtttgggtaataaaagcgaaattttattttaaaaaaataaaacgaagtaaagatattgttatttatatttagttgacgttaagtaaaggagtttatttttttttttttgagatggagttttattttgttattttggttggagtgtagtggcgtgatttcggtttattgtaattttcgttttttgggtgtaagtaattttttcgttttaggttttcgtgtagttgggattataggtattatattcggttaatttttgtatttttagtagagataggattttattatgttggttaggttggttttgaatttatgatttcgtgatttgttcgttttggtttttagaagtgttgggattataggtatgagttatcgtgtttggtttttttttttttaagatagaatttcgttttgttatttaggcgcgattttggtttattgtaatttgcgattcgattttttggtttaagtgattgttttgttttagttttttaagtagttgagattataggtatatgttaatacgtttagttaagttttgtatttatcgtgttttattatgttggttaggatggttttaattttatgattttgtgattcgtttgtttcggttttttaaagtgttgggattttaggtgtgagttattacgtttagttaggagattatttttgatattgtggtttaaagagtaaagatttaggttttttagagaaggaattttgttttaagattgttatatagaaattttgtttgagtggtcgggcgcggtggtttatttttgtaattttagtattttgggaggtcgaggtgggcggattatgaggttaggagttcgagattagtttggttaatatggtgaaattttatttttattaaaaatataaaaattagttgggcgtagtggtgtatgtttgtagttttagttatttgggaggttgaggtagaagaatcgtttgaatttaggaggtagaggttgtagtgagtcgagatcgtgttattgtattttagtttgggtaatagagtgagatttcgttttaaaaaaaaaaaagaagattatagttaatgaataagtaatcggtcgggcgcggtggtttacgtttgtaattttagtattgtgggaggtcgagacgggtggattacgaggttaggagatggagattattttggttaatacggtgaaatttcgtttttattaaaaatataaaaaaattagttaggcgtggtggtaggcgtttgtagttttagttatttgggaggttgaggtaggagaatggcgtgaattcgggaggcggagtttgtagtgagttaagattatattattgtattttagtttgggcgatagagtaagattttattataataataataataataataaaaataatgaataagtagttatggtgtaatgtgataagatatttaggtgttttgagagttagaggagggtttaggggtttcgtggtttatgttttaacgttggtgttggtttttttttttttatttttgtgtttgtttttagtttttgttgttttgttaggattttaaatgttttttaattggttttttagtttttatatattgattttagaataatatttttgaaatgtaaattaaattatattatttttttatttaaaattttatatagtaaatcgttttataagttgtaaatgttgttttttttataaggtatttttttttttttttttggtttagtgttattgtggttttttttttttttttagttttgaaaggttttgaatttgtagtttttttaatgcgttttggggttttattgtttatttggatgtttgtattttttttttgttaggtaaatatttattttttaaggttattttaagtttattgatgaaatttttttgattttttagagagatttaatatttttttgtttgtgtttttgtgaattttatatggatttttattttagtttgtattagttaggatggttatattatgttgtagtaataaataattttggaattttagtagtttaatataatagttttattttttattattgttttttgttgggttagtaggagtgttagagtttttgattattatagttatttaggtatttagattaaaggaggttttattaaaagagggtgttggagtgttttgtgttatattggtagttaaatatttgtgtttgatagtaataatatatgtgatttttgtttttattttattggttaaagtaagttagttaggttttttgtagtggtttaattttaggagggttgaggaattttattttattatgtgtttggaaggtagaaaacgggaaaatttatgaagagttttaatggttgttttaattcggtgtagcgttgattggtttatatattttttttttattggatagtgggggaattaaacgtgttatagcgtttttattttttagtagtttgtgttttaggaatgtggagagattagtatatggatggattataattttgtgttaatgttatagtttgggtttgttggcgtggaaggagtttgtggaagaagggtagtagtttatagggagaggaggatggaaagggatgattttaattttggtgattttgatagtagagtttgagataggatttggtcgtaggtagttaatttaggtgattttagaaagtagaagcgaggttatagggagtgtgagattttgaaggaggaaaggttagtttaagagaatgatgttggtcgggtatggtggtttacgtttgtaattttagtattttgggaggttgaggtgggtggattatttgaggttaggagttcgagattagtttggttaatacgacgaaattttgtttttattaaaattgtaaaaattagtttggcgtggtggtatgtgtttgttattttagttatttgggaggttgaggtaggagaattgtttgaatttgggaggcggaggttgcggtgagtagagattgtattattgtattttagtttgggtaatagagtgagatttcgttttaaaaaaaaaaaaaaaaaaagagtgatgttattgttgtgtgtagtggagttcgatttttttaggtttttttgaggagagagttgaatgtttttagacgttttttatttgaaggataggaggtaggagtatttgtttattgttttttattttgtaataattgtaggttgattttgggtattagttttttgttttttttttttttttttttgagatagagttttgttttttttgtttaggttggagttgtagtgagttgagatagcgttattgtattttagtttgggtgatagggcgagattttattttaataaaaaaaaaaaaaaaaaaaaaggttggttgtggtggtttatgtttgtaatttgagtattttgggaggtcgaggcgggtggattatttgagattatgaatttgagattagtttggtaaatatggtgaaatttcgtttttattaaaaatataaaaattagtcggcgtgttggtgggtatttgtaattcgagttatttgggaggttgaggtaggagaatcgtttgaatttaggaggcggaggttgtagtgagttaagacggtattattgtattttagtttgggtgatagagtgagattttgttttagaaaaaaaaaaaaaaagaaaaaaattatgatatagagaataatgagatgttttataaatttatagtttaaaagaaatattttattttggtaaaagttaagaagtgaaagataaatagttttgtagttataaaaaaaaaaaattaaattatgttttttgtagtaatatggatggagttggaggatagaattttaaatgaattagcgtaggaatagaaaattaaatgtttaatgtttttatttataacggaattaaatattgagtatatatggatataaatataggaataatagatattgaagattattagaaggggagagagggagggagtgtgggttaaaaaattatttaattggttttatgattatttagtgtaatatatttatgtaataaatttgtatttgtattttttgtatttaaaataaaagttggaattttaaaaaaaaaaaaaggttaggcgcggtggtttatgtttgtaattttagtattttgggaggttgaggtaggcggattatttgaggttaggagttggagattagtttggttaatatggtgaaatttcgtttttattaaaaatgtaaaaattagttgggcgtggtgttagtcgtttgtaattttagttatttgggaggttgaggtaggagaattgtttgaattcgggaggcggaggttgtagtgagtcgagattacgttattgtattttagtttgggtgatataaagagattttatttgaaaaaaagagaaagaaaatgtgtttttatgtaagtgagaaatgttttgaaaaaagaaaaaagagaaatattttaaaatgaaaaatttgagttttttcgtaaaaaaatttttaatgaatttttagtattttgggaggtttaggttggaggattgtttgaggttagtttaagattagtttggaaaatatagtaagattttatttttaattaaagtaaataattaaaaaaaatttagtttggtatgatggtatatgtttgtaattttagttatttaggaggttgaggtgggaggattgtggaagtttaggagtttgaggttgtcgtgagttatgattaggtttttgtattttagtttgggtaataaagtaagattttattttaaaaaaaaaatatttttcgaggttaggtatagtggtttatatttgtaattttaatattttgggagattgaggtaggaggattatttgaagttaggagtttgaggttagttcgggtaatatattgagatttttgtttttataaaagtaaataaatgaataaattagttgggtatggtgatgtatgttttttgttttagttttttggaaggttgaggtgggaggattatgtgagtttaggagtttgtggttatagtgagttgtgattgtattattaaattttagtttgggtgatagtgagattttgtttttaatttaaaaaaaaaaaaaaattttggttgggagcggtggtttacgtttgtaattttagtattttgggaggttgaggtgggcggattacgaggttaggagtttaagattagtttggttaagttggtgaaattttatttttattaaaaatataaaaaaattagttgggtgtagtggcgggtatttgtaattttagttatttaggaggtttgaatttgggaggtagaggttgtagtgggtcgagattgtattattgtattttagtttgggtgatagagtaagattttgttttaaaaaaaaaaaaaaaaaaaaaatttttggaaggaatggttggtgggtggtatatagatatgaatttagatcgtttatgaatcgagatcgtttatgaattgaagttagatgatggatatatatatgaaagtttattttattattttttttattttataatatgtttgaaattttataaaataaaatttaatttgtagagagattgtattagggttttttgttaatagtttagtagggtattttttttttttttttttttttttttttttttttttttttggagacggagttttgtttttgttgtttaggttggagtgtagtggtgtaattttagtttatagtaatttttgttttttaggtttaagtaatttttttgttttagttttttgagtaggtgggatgataagtgtttgttaagatattcggttaatttttgtatttttagtagagacgggattttattatgttggttaggttggttttaaatttttgattttaggtgatttatttgttttggttatttaaagtgttgggattataggcgtgagttattgggtttggttttgaataggtattatatgtatttagtgaaaattataaggagtaataaaggggatttggtgaaaattaagttgttttttttattttttattttattttttagtttttagttttttttagaggtaatttttttatttagttttttgtaaatttttttagtgaaattatatatatatagagagtatatgtggttattatttttttttttttttttttttgtataaatggtggtattttatatatatagttttgaatgtttatttagtttaaaagtgtatattatataatatatatatttggagatatttagttttgtatatatagataagttttaagtttgtagagattgcgtagtatttagttgtttttatattataatgtgttgtgtttgttttttattaatggacgtgggagtttttaaatatttttttttggtaatagtgaatgttaaagtaaatattttggtattttttatatttgtagggtagtcgattttttttttttgatggttttaatttttaaaggtaattttaaggggagtgtattttgttgttggttttgtggatgataggtgataaaatagggtgagtaaggttacgaaatagttaatgaatttgttaagttaaatttgaggttttaggttgttttaagttaaagtttgaattttttatattatattggggttggggttagagacggggtaggaggagttttttttaggtataattttttatttgtgttgggtaggaaagtaaggtatgaacgtatgtttttttattgggtaagttttttttttattttttggtagtattggaggagtgagggtaggaggatttttttatgtgagttttaggttatttttttgttaagagggtattggtatttagaattgggaaggggatgaatatttttttattttttaggataaaggaaaatattagagaggaatttttaatgaaagggtagaggaggttagtgaggtttttattgttattaatgttaagtttagagttggggttggggtggtgaggatcggagttagggtaatttagttataggttatttttttttttggtttatttttagttgatttttgagtatttgagttgtgtttattatttttttatttgggttatttagggtagtttttttgatgggtagtaagaagtgggtgataatatgtattatgttttttattagtttaaggatagtggagattttagagggttgaggtaagagttgcggtgtgggtagatggatattttggtatattttaggtttgtgagtttttagaggttgagtttttgtttgaaagagatatggcgtttataggaggttagggataggttttttgttttttgggaggttttattttattttttagtttttcgttttatttttaggaattgtttgtgtaatggatggataaggataggaggtttagtgtttaatttagtgtttgggtttgtagggtggtttttgaggtttagggttttggaagagtttgggtatggggaggagttttatggggtagggtaaaattttttttgaggttttaagggtgatgtatgtggagattttttaagattatagttgggtaattattttaaagttagtaggtagtgtttgttaggatgggggatggtgtgggtatcgaggaatttagtagaggtttttgtgtggaaatgggtggggtttgatttaatgtaaatatttttattaaaaaagaaatggatgagaaattaaagttaattttgttgttgatttgaaagatgttatttatttggggtggaaataggatgggggagggtattggtttgattttatttggatagtttattgtttaaaaaaaaaatttttggattttttttttggggagtttgagataagtgtataagtagttagaaggtgggaaatggcgtggataggttttgtaggagtttggaagatgagggatttgagaaggatggaaaagaaggtgttatgggagagggggtgttaagaggaaagagtttaggggagagagggtttggaaatgtaaggggttggggtagattttagggatgcgtaaggagtttttagtagttattaaagagaagacgtgaggaagaggtattattatttggtggttatgagtgtggatttaggagttatgttgtttgggtttgaatttcggttttgttgtttagtatttgtatgaatttggggtagtttatttaatttttgtgtgttttagtttttttatttgtaaagtgggagtaataatagaatttgtgttataagtttgttgtgaggattaagtgagtatttatatttaagatttaaaaatattgtttggtattatgttttgttaatatgaagttttttttttttagaagtagatttggagataagggttttagtgtagatagtgtattttggaggtgatcgtaagaaatatgggtagtggagtgtgatagagaaggaaggtagttaatgaagggtgtgttattaggtaaatttattattgtgggtgagtggaggttaattttatttaggaattttggagtggtgtagagttattttatggtttagggtgagggagtttagtatttatattaattagttattggttgaaggttttaattttttgttatttttagttttttgtgtatagatggtgtaggatattaaaaataatttttgggtagagatagagatgttgtagttggaagttagtggagtattttagtgataaggtttaagggatatggtggggtaaggatagatttattaaaattattaagaggtttgtagagtaatgttgaatttttatttaaagttatatattaaggttgtgaattaggttaagttagattagttttttaatttgggggttgatttgtagttgttatagaaggttgaggggtggtagattttaggatgatcgcgaagtttaggtttaagtggttagattggataaggagtagattggttattagagtggggtcggtttttgttatatgttacgtttttttagaaatttttagttgtaaggtgttgagttttttaggggagaataaggtattttgagaggttattagagtattatttttgatttttaaattttgattagggggtttggtatagtggtttatatttgtaattttagtattttgggaggtagaggtaggtggattatttgaggttaggagtttgagattagtttgattagtatggtgaaattttatttttattaaaaatataaaaattagttgggtatggtagtatatgtttgtaattttagttatttgggagtttgaggtaggagaattttttgaatttaggaggtggaggttgtagtgagtcgagatcgtattgttttattttagtttgggtaataaagtaagattttgttttaaaaataaaaaattaaaaaaattaaaagtaaaaatttaattttgattaggagatgaagtatagaattggggtattggttttttttttttggaattgtatttttggaagtagatattagaagtttagaattgataagaagaaatttggataagatggaagaagttggtaggagaggtatgtttgttttttagatattatttatttgtttttttttatttggagtgaaaatacggttatatttgttgggtttttgaatggtataagaaatagagaagttaaggtcgtttttatttggtggggtttattgaaaagttaatcgggagtgtcgaggggaataaaggtttggtatttttagttttataggttaggttatggtttttttatattcgattgggttttttggagagttgatagtggattataattgattttttgttaatggaatatgaatggaagagtggggtgggaggtagatttgatggagattttgttttaattatgtagataaggataatttttaaaggtatgaattatagatggaaggaagttggaggtttgaaggaggttgatgagtagttttgttagttagggttatatacgttattttagttttgtttgtttattttgagttttttattttgtttttattttttttttgttgagatggagttttgttttgttatttaggttggagtgtagtggtacgattttcgtttattgtaagttttatttttcgggtttacgttattcgtttgttttagtttttcgagtagttgggattataggcgtcgttattatatttagttaatttttttttttttgtagttttagtagagatagggttttattatgttagttaggatggtttggattttttgatttcgtgattcgttcgtttcggttttttaaagtgttgggattataggcgtaagttatcgtattcggtttttgaggtttttatttatttattttttttgagatggagtttcgttttgttttttaggttggagtgtagtagcgcgattttagtttattgtaaatttcgtttttcgggtttttgttatttttttgttttagtttttcgagtagttgggattataggcgtttgttatcgcgttcggttaattatttgtattttttagtagagacggggttttatcgtgttagttaggattgtttcgattttttgattttgtgatttattcgtttcggttttttaaagtgttgggattataggcgtgaattatcgcgttcggtttttgaggtttttatttgaaagtgtagtaaaattttattttatttaagttattgtattttagggtttttttattatagaagtttaacgtgtattttaataaatatatttttttgagtgttgtttttggtttttatattgattttttgttaggtatattagttagatatggtttggttttgttataattaagttagaataatagtagtttaaatggtttgagtataagtggtttaggttaattttattagttttataggattggagagtagggtttttttaattttgtttttttattattatttatatgtgatttttattttgtgatttaggtggttgttttagagtttattattttgtttatattttagttggtgggaagggaagaagttttatatattgaggagtaaatatttttttttaagaatatattttgtgggtttagaaaatttgggagttttattatttaagtaggaagagagaatgaattttgttatattgtgttaagttgatgtagtttaataaatattgggaaaaatttatgaaagaaaggtttttttttttgaaggtagttgttatatattagtttgatggttttaaaaggtatttaaagtttagtgatttgaatgtttagttaggttaggttttattacgttttggtaattaataatttagaaatatttgttgttataggagggtttataaaatatagttattaattttttttattttgatgtgtttgtttttttgtcgtgtgattttgttattttttttattaagaggtaaattttatgtttttagttttaaatttgggttgattttgtgatttgttttgattaatagaatgtggtagaagtgatgttatgtgatttttggggttaggtttcgagagattttgtagtttatgttttggattttttagaagttgttttgagattgttatgttatgagggttagggaggaaggatttgttgttttattgttaattgaatttagtttttagttgattgtcgttgtatggaagattagtagaagaattttttggttaatatgagaaagaataaattatttttaaattttttatatattgggtgggtatttttttttttgtattagtagaaatgtaatgaattaaaataataaaggtttattttttggttatattatttatttattgagagttagtcgagtattgcgtttttttttttttttttgagatagagtttttttatgttatttaggttgaagtgtagtggtgtgatttcggtttattgtaatttttgtttttcgggtttaagcgatttttttattttaattttttgagtagttgggattataggcgtatgttattacgtttagttaatttttgtatttttagtagagatggggttttattatgttggttaggttggtttttaatttttgaatttaggtgatttttttgtttcggttttttaaagtgttgggattataggtgtgagttattgtgttcggttggtattgtgttttcgatattatttagggattttggttggtggagtagttattattttagacgttattatatagaggggaagagtagggtgaagattatattgagtttttattaggaagtgatatatattatttgtatttatattttattggttaaaataagtggttggggaaattttattttattatgtgattgaaagaagataaggttatagtatttgtgaatatttttaaatattttttatttttacgatagtttattttttttttgtaataatttaagtggttgtgtagggttggtatgatattaatattgtgttagatatttaggtttttttgtttgtttgttttgttatttttagtatgttgtttttatttttttggtggaagacggattttcgttaggtttatattttagtttatgaaaagaaaaggtatattgtttttttattttagggatataatttggaaatgatatatataagttttattaatattttattagttagaattaagttatttggttatttagttgtaagggaagttaggaaatatggtttttagttgggtgattgtgtgtttttttaattattttttattgtggaaggagggagaaaagatatttgaggggtaggggaggtattagtagttttgttatagtagttattttggagtttttaatattaggatgttttgatttttatgtatttagttttgtttaaggggagttttaatttgtgtatttttttttttttttttgagatagagttttgtttttgttatttaggttggaatgtagtggtatgattttggtttattgtaatttttgtttttcgggtttaagtgatttttttgttttagtttttcgagtagttgggattataggtttttgttattatattcggttaattttttgtaattttagtagagacggggttttattatgttggtcgggttggttttaaatttttgattttatgatttatttgttttagttttttaaaatgttgggattataggcgtgagttattgtgttcggttttattttttttttttttttttgagatgtagttttattttgttgtttaggttggagtgtagtggtataattttggtttattgtaatttttattttttaggtttaattagttttttaaggatttatttataaattaaaagggtttttacgaatttaaatgattattttagagaggttttatgtttatttttttattggttttatttatttttattttatattgtttaaaaaggtattgaaaagatttttgtgggttagggagattaatatattagttttaagtttttttgttttttgtattttatataagtgtaggttatgatttaaaggtatattttagttttcgtaaaagttttatttttttgagtaattaattttaaatgtatttattttgttagttgggaattttatttattagatttttcgtaaaaatgttgtaaatattttttttgtttttaaaattaagtgttgattttattttttttatttagattatttttagggaaggattgtagggaataaaaaagtattgttaatttttttatttattaagaagttttaaaaaaattagttttatttttttcggaagtttatttttaagaagatagaattgttttaggtttttaggaagtaaaatttatttggtataatttaaaagaatattaaaattttatttaaatgaaatattttgtaatattttggatggtttgtgggtttgtgtgttttagattattgattatttatataagagtaaggtgtatgtgtgtatatacgagtttaaatatgtgtttgtttgcgtgtttgtgagtatgcgtgtatggtgtatatgtgtacgtatgggtgggtggagcgtgggggtagtatataaagtttgtgggggagatttattgattttatagatatattagtattagggagatagggtaaaggttttattttttagtttagtttttaatttttgtttattatttttttaatagaagattattttttttgttattttttggttttttttttttggtagtaatgaagtagttgttgatttagttttagttttcgggaagttagatgattttttttttttcgcggttttttatttttcgtcgtttttagggaggatattatgggtttattgatggtttttttttgtttgttgtttttgtatttaggtaggaggtagggaagggggaacgttagggttttgtgtgtgaggttggtgtttttagtttgaatttttatgtgtgaaatagttttttttgtttttttttttttatttgtgttttttttttttttttattgttgtttttttgtttttacggttttaggtttggtagattcggtttttttttgtttttagaacgtgaatatttcgggtggtatttttatttttagttatggttgggtttttgggagtttttttatttatttttgtttttagggtttgtatttatttttagtattacggttgtgtaagagtagcggatagtggtagattttaggagttattcggtttttgtttaaggcggtttgtaaacgtgaggttttttgtgggttttgtttagggtgttatattaggggttattttagaatttttgtttaggagttgtttagggtgggatttaatttgattagatggtaaagttgtttttgtagagggttttttaaaatatttagaaaatgttaattgttagtagtaaggaattgggaataggttttgatggagattgtggggtattaaagttagggatgattttttatgtataattgattgtttagtagtgattatttagaatagatgttgaatggttttggagttttttagatatttgaggattttaaggggagtgtttggggaggttacggtttttaggagattgagggaagtggttatttattaattagttcgtttagattttgtgaaattggtaatatttaattagttgttaaaaatagtaattttatatgttgtaatttaatattttagtgttttgatagttagttgattatttttatgtattttagtataaaattatttgtttaatttttagtttaggtgttatttatttagttttatattttttatttattttttttttttttagttgtgcgttgtttagtttttgttttttttgagaatggtatttatattttacggttggggttttatttcgtgggtggtaatgtgagtttcgagtgtgaggatggttttatattgcggggttcgtttgtgcgttagtgtcgttttaacggtatgtgggatggagaaatagttgtgtgtgataatgggggtgagttttttggttgatgggttatatagggggttggggttttttggggaattttggggtttaatgtgtatttaggaagtttttgtggggataggagtttgttgtttagtgtgttataataatatttttggattttggtaaattgaggtttataggttatatattataagtttgtaagggttaggttttaggtagttggtgttaagttttagatgtagtataaagtttttatatattttgtttggtttttttaagtgttttaaagtaagattttatatttaggttttatagattgttgtagggaagatatgttgggagagagttaagtattgtgttttaatgttttgtttttaaagttaggtttgggttttaagttttattttgattttgatagattttgggaaggttatttaatttttttagtttttagtttttttatttgtaagataaggatagtgagtgttgatttgagattgttatttggattaaatgagttgatattagtaagtatatataatagttttggagtgcggtggtttacgtttgtaattttagtattttgggaggttaaggggggtggattataaggttaggagtttgagattagtttggttaatatggtgaaatttcgtttttagtaaaaatataaaaattagtcgggtgcggtggcgtatgtttgtaatattagttatttaggaggttgaggtaggagaattatttgaattaggaagtggagattgtagtgagtcgagattgtattattgtattttagtttgagtgatagagtaagattttgttttaaaaaaaaaaaaaaaaaaaaaaatgttagtttcggtgttttacgtttataattttagtattttgggaggttgaggtgggtggattatttgaggttaggagattgagattagtttggttaacgtggtgaaatttcgtttatattaaaaatataaaaattagttgggcgtggttaattttagttatttaggaggttgaggtaggagaattatttgaatttgggaggtagaggttgtagtgagtcgagatcgtgttattgtattttagtttgggtgatagagtgagattttgttttaaaataaataaataaataaataaaaaataaaaaaaatagtttttggaatttgataaatgttatgtatatttttttttttttttgagacggagtttagtttttgttgtttaggttggagtgtaatggcgtaattttagtttatcgtaatatttgtttttcgggtttaagtgatttttttgttttagttttttaagaagttgggattataggtatgcgttattatgtttcggtaattttttatttttagtagggatagggtttttttatgttggttaggttggttttaaatttttgattttaggggattttgtttattttggttttttaaagtgttgggattataggcgtgagttacggtattcggttttgtttttgtttttttaagagataggatttcgttgtgttgttaaggttggttttaaatttttgagtttaagtgatttttttattttagtttttttagtagttgggaatgtaggtatgtgttattacgtttggttataagtatttttgttatagttattgttgtttttgtgaatggtgaggggttttgtttggtagaagtagggtttttaggattttttggagttgtatttgtttgtgggtttgggagttttttggattatggtttttagtatattatatagaagatacggagtttataagatggtaggattatttttatttagtggtttagattatggatttttatttatgtttttgggttttggtaaatggttatttattttgtaggagggtgaagtagatgtttggtaagattgtgataagtaatgtttgaattattagacgtgattttaatttattttaaaattgaggtataatttatttattgtaaaatgtataaattttaattatttagtttaatgatttgttataatgtatttatttatttaattattatttaagatagaatgaggtttttttttgtttttttttataaggtaattgtttttttgatttttgtttttatggattaggtattttgtgtttatattttttgtaaatggaattatgcgggatgtggtttgttgtttttggtattttttgttttatattttgtttgtgagatttatttatgttgttgtgtgtattagtattttgtttttttttattgttgtgtagtattttattatatgggtatattataatttatttattttttttttgatggatatttggattatttttagtttggggttattaggagtaaagttttaggaatatttttttttttttttttttttttattgattatttttgggtgttttttatagagggggatttggtagggttataggataatagtggagggaaggttagtagataaataagtgaataaaggtttttggtttttttaggtagaggattttgcggtttttcgtagtgtttgtgtttttgggtatttgagattagggagtggtgatgatttttaaggagtatgttgtttttaagtatttgtttaataaagtatattttgtatcgtttttaatttatttaattttgagtggatatagtatatgttttagagagtatagggttgggggtaaggttatcgattaataggattttaaggtagaagaattttttttagtatagaataaaatgaaaagttttttaggtttatttttttttatatagatacggtaattattcgattttttaattttttttttattttttttttttttttattttataaaatcgttattgttattatggtttttttttaatgagttgttgggtatattttttagacggggtggtggtcgggtagaggggttttttattttttagtaggcgcggtcgggtagaggcgttttttatttttcggatagggcggttggtcgggcggggggttgatttttttatttttttttcggacggggcggttggttgggcggggggttgatttttttatttttttttcggacggggcggttggtcgggcggggggttgatttttttatttttttttcggatagagtggttggtcgggtaaagtggttttttattttttagtaggggcggtcgggtagaggcgttttttatttttcggacggggcggttggtcgggttgggggttgatttttttatttttttttcggacggggcggttggtcgggcggggggttgatttttttatttttttttcggattaggtggttgttgggcggaggggttttttattttttagatagggcggttgtcgggcggaggggttttttattttttagatggagcggttgttaggtagagggtttttttattttttagacggggcggtcgggtagcgacgttttttatatttcggacggggcggtcgggtagaggtgttttttatattttagacgatgggcggtagggtagagacgttttttatattttagacgatgggtggttaggcggagatattttttattttttagacggggtggcggtcgggtagaggttgtaatttcggtattttgggaggttaaggtaggttgttgggaggtggaggttgtagcgagtcgagattacgttattgtattttagtttgggtattattgagtattgagtgaacgagatttcgtttgtaattttagtatttcgggaggtcgaggttggtggattattcgcggttaggagttggagattagttcggttaatatagcgaaatttcgtttttattaataaaatacgaaaattagttaggcgtggcggcgcgcgtttgtaatcgtaggtattcggtaagttgaggtaggagaattaggtagggaggttgtagtgagtcgagatggtagtagtatcgtttagtttcggttcggtattagagggagatcgtggaaagagagggagagggagattatggggagagggtgagggagagggagttttaggaatatttttgtatgtgattttggtatatgtatgtatttgttttttttgagtaaatgatttaaatgtggaattgttatattataggttggtatatgtttagttgtagtagaggttgagaaagttttatttacgtatatgttagtaaggtaatagagtgttagtcgttttgtattttttttaatatttggaattatttgttgttttagtgttagtcgttttgatgggtgtgtagggatgttttattgtggtttatgaaatataaatgttttttgaaggagtggagggattattagttgattttttttttgggtttttgggggttttgggatagatatgggtgtatttttgggttggaattgggaagtttttgttggtaattgaggtcgttgaggaggtagagtttgatgggagggggttatttatttttgtttttttttgtttattcgtagttggttattgttttaatttaggtattttattgggcgtagtgcggataggttttcgttttggttatggggataaggttcgttatcgttgtttttcgaattttgtgtttacggggttttcggagcgggagtgttagggtaacggggtttggagtggaacggagtttatttgtcgtcgtgagtagttgttttgtttttttgagatttttcggtatattcggttattgtttcggttgatttttgtgtggttttttttatagaattttatttttatgatttttttgaggacgtggtttttgttttgggtattttttttttttatatgtttggggttattaattttatttagaagataaagggtgagtgtttgaggtggggtttttggttgagtagggtgttggatttgggtcggagtaagggaggatgtaatttttttggaggttaggagttttggtgggtttagttattgaaagggagggaggtagagaagttggatttgtttggcgagagcgtaggaaggaggtggggatttgaattttttttttttatatttttttagaaagtttgggtcgtaaaatttaaatttagcgttttggttatttgaatttttatttgtttttggattgttcgtagagtgtgtcggaaaatgatttttttatttttaaggagagcgttttttttatggtggatagggttaggaattaggagtttgtttgtagtagaggtttttttgtgtttattatttttttttgttttttttttttttttagaattttatttatagtttattttttttaagaagtttttttagattatatttatgttatgtaggaattatgaatttaatttatataattataatttttattttataagtattgttgggatattgtgttggggttgggggatagtaaagatggaaaggttgaggttttattttttaggaatttattatttagaatagtggtttttatagaaaggtagtgagataatttataggagtgaagtagaaaaatattggtgtttttgtggaataatttaaattagattaataatttaatatttaataatttttttttaaaattttaatattttgtgtaggttttaaaatgtgtgtgatagattgggtatggtggttagtgtttgtaattttaatattttgggaggtcgaggtaggtggattatttgaggttaggagtttgagattagtttgattaatatgatgaaattttgtttatattaaaaatataaaattagttacgtgtgatggcgtacgtttgtaatttagttatttgggaggatgaggtaggagaatcgtttggattcgggaggtggaggttgtagtgggttgagattacgttattgtattttagtttgggtaattagagtaaaattttgttttaaaaaaataaataaaataaaataaaataaaataaaatatgtgtgatagaagtttggaagttattggtttaagtttttcgttagaattttgttttgtaattgtgttttttataatattttatgtaatattatagatggtttttttttttagttatattttaaagagggtagtttttgtgtttttttgggatttaaaattaagtaatttattgtattgcgaggcggtaatatatattagttggagtagtgattgagaattatgtgatatatttagattttatttttattttttttttatggtgtgatgggggaagggggataaggtaatatattttaatttttttatttataaaataggggttattatgttttttatagggtggagtgaagagagtttgttaaagagaaagatgtttaataaaggttttttttttagttgttgttgttttttatttttattattattattattattatttttgagatagagtttttgttatttaggttggagtatagtggtgcgattttagtttattgtaaattttgttttttgggtttaagtgatttttttgttttagttttttgagtagttgggattataggtgtttgttattatattaggttaatttttgtatttttagtagagatgggttttgttatgttggttaggttggtttcgaatttttgattttaggtgatttatttgtttaaagtgttgggatttaggtatgagttatcgcgtttagtttttagtttttttttaatagttattttttagtgttttttttggtttttgtttttgtcggttttattttagtttttttgttttttttagggttttttgtttgtttttttattattttttttttggttttagggttttttacgttgttttttatttgtttcgtatagatttttagttttgagattaatgtgagcgttgttattattatttttgttttagagtttaaagtttttatgtttgttttgaacgataattttcgggatatgattgaggtgattagtagtttggaaaatgttaattataaaggtacgggtgttattacgtgatggtgatgagagaggagaagatggatttttttagggtttgtaaataaattttggatgagttaaaaagagagtgaggttttttggtggtatttgagttttacgagtttggggtagttttaacgtttagggttatggtgggggagtttagttgtttttagtttatagtttattttgagatgttgtaggtttaaagatattgtgtaggtttttaattttttttagttgttaaaattatattgtttggtttgtatggttgtatattgttatttttttatgttattagttatttatatattatgtaaagtgtttggttggtatttagtaaatggttgaagttatttaaggttttggaaattttatttttgaattttgggattttagtgtggttttggattggggttatgtaatgaatatttttttttttttttttttttttttttttttgagatggagtttcgtattgttatttaggtttgagtgtagtggtacgattttggtttattgtaatttttgtttttagggtttaggtaatttttttgttttagtttttcgagtagttgagatttcgggtatttgttattatgtttggttaattttttatatttttagttgagatggggttttattatgttggttaggttggtttcgtgattttgattttgtgattcgtttattttagttttttaaagtgttgggattataggcgtgaattattttgttcggttttatgtaatgaatatttttaaggtggaaaggtttttaaagtttgaataagtaatgatgttatatttttatttgaatggtaaatgtttgagtttattaaaataatcgataaattgtatttttaggtcgggtgtagtggtttatgtttgtaattttagtattttgggaggttgagatgggcggattatttgaggttaggaaattagtttggttaatatggtgaaattttatttttattaaaaatataaaaaattagttgggtatggtggttggtatttgtaattttagttatttgggagattgaggtatgagaattatttgaattggggaggtggaggttgtagttagttaagattacgttattatattttagtttgggtggtagagcgagatttttttaaaaaaaaaaaaaaaaattgtatttttaataattgggggaatagagtgattttttatttttaggtggtaggtgggaagtttttaagagagtttttttttttggtatattttagattatgaaaatggaattgggattaatatttatgtagttttaaatagtgtttattttatgatgaataattaaatgcgatttttcggtatggaaacgatggtttggtaggaaattcgatatgttattatttttttgatagatggtgggtattatggtttttgagtgtgtttggaatagtggaaggggtattaatatggggttagaagttttgaattttgattttttttttgttttttattttgggttttagttttgtttttgtttttagagatggggttttgttatgttgtttagttgattttaaatttttggttttaagtaatttttttgttttagttttttaaagtgttgggattataggtatgagttattatatttggtttagttttttatttataaaatagggttagtgtggtggtttatgtttgtagttttagtattttgggaggttaaagcgggtggattatttgaggttaggagtttgagattagattggttaatatggtgaaatttcgtttttattaaaaatataaaattattagttgggtgtggtggtaggcgtttgtaattttagttatttgggaggttgaggtaggagaattgtttgaatttgggaggtagaggttgtagtgagttaagattatgttattgtattttagtttgggtgatagattaagattttattttgttttaaaataaaataaataaataaatagaattagtgttgatgatgatgatcgtaattataatgatagtaatgatgattatgatggttgtttttttttttttatataatttttatggaaagttatttaagttgtttgtgtgaaagtgttttgtgttagtttttgttattatttgggaggtaatttggagatagatgaggaaacgtggtttttgagtaggaatgtcgaagggtacggatgtaaggaatagtttgtagtggatttggttttgttatttgttttttgttattgtttaaattatatagtttttttaggatttagtatataaaatgaggatatttattttatttggggttttatgagaattaaatgagttaaagtataggaagtatttggtttggtgtttggaatgtagaatattttagtaaaagtgtgtatatatatatatgtatgtatatatatatatgtatatatatatatatatatatatatatatatatatttatttttttgagatagggttttattttattgtttaggttggattatagtggtgcgaattcggtttattgtaatttttgttttttaggttgaagtaattttcgtgttttagtttttagagtagttgggattataggtatgtgttattatgtttggttaatttttatttttattttttgagatggagttttatttttgttgtttaggttggagtgtaatggcgcgattttggtttatcgtaattttcgttttttaggtttaagcgatttttttgttttttgagtagttgggattataggtatgtgttattatattcggttaattttgtatatttagtagaggtgcggtttttttatgttggttaagttggttttaaatttttaattttaggtgatttatttgttttggttttttaaagtgttgggattataggtatgagttattatgttcggttatatttggttaattttttgtggttttagtagagatagggttttattatgttgtttaggttggtttggaatttttgagtttaggtaattcgtttttttcggttttttaaagtgttaggattataggtgtgagttattatgtttagtttaaaagtatattttgaagtttttataggtaatgtaaatgttgaggtttttaggttaaatgtttttttatttttttagggtttggggaaattttgatattatttagaagaattttttattttttttgttttaggaaagtttaatatgggtggtttttttaagatagttgttgattatattagagagattttgaatattaattagaagaggaatgattatttgggtgagtttttgttattgttattatatttgttttgtttttgtagaggttacgagatttttagttagggattttagtattttagttatggtttagagttatatggttttatttttgcgttgttttgtataaaggtaatttatgttgaagagtttggggttaaattattgtttatggttttaattttattttttttttttttttttttttttttaagatagtgttttattgatatttagagtatatttttggaaagatgtttatttatgtcggtttagaagttggtttagaaagtaacgatgtttattatgttattatgaagtgtagtggtgtaattatagtttattgtagttttaaatttttggttttaagtgatttttttaatttagttttttaaagtggtaggattataggtatgagttattatgtttagttcgtttttataaattttttaaaattaatttttaaattttttttgagatagaattttgtcgtgttgtttaggttggagtgtagtgattcgattttaatttattgtaatttttacgttttggttttaaatgatttttttgttttagtttttagagtagttgggattataggtgtgtgttattatgttcggtttatttttgtatttttaatagagatagagttttattatgttggtagtttggtgttaaatttttggttttaagtgattcgtttgttttggttttttaaggtgttgggattatagataggcgtgagttattgtgtttggttaatttttaattttttaattattatttttaattaatagttttagatagagaattttggttttatttttagtgggttgtggttatgggtagtttttttatttgtaaaaggggagtagtattaggatttagtttataagttgataggggaagatgtttagataaatattgtttgtttggtatagaaaaatgtttagtatatgttagttatgattacgatcgtcgtcgttattattattattattattatagtattttatgttttaggaaattttttaggaagaagggatttcgattttttttggggaatgtttttggtggttgtttttttagtagtatagttggttaattaaggttttggtagttgtagtttttaaaggaaaaattttttaggtttagattaaatataaattgtattgatttttgattagaaagtaattttagagagagagatgtttagatagggagggtagttggttttgagttttaattttttattttttttttagttttttttttttttatttatattgtttttttttttattatttggttttcgggggtaagttgatttttttttaaaattttggtttaaggaagataaaatttaaagtttattttttttttttttagtattattggattaaggttaaatgttataaaaatattttattgaaaataagtaggaaattaaacgaaaatagttaaagaaaacgtataaggtacgatcgttgtttagttttaattgtaattgtttttatttgggttattgttagattgttttttggttgaagattttttggtttatttaagtattttgttttttatatataacgcggggttttttgagaataaaaatgggttataaggggtgtaaaggttgggagaggagtagattttgtggtttgtttgagggtagttttgattggtattatagtcggaggataggcgcggtttgttgtgtgggtttagggtttttagtgggaaaacgtggttttaggttttttttttagatgttattttttatagaggaagattagatttgaggtttagtttttatgttgtgttttgagttttttttatttatttagttatttaaaagtatttattaaattattataaatttgggtggtttagaatatagaattttttttttttatagttttggaggttagaagtttgaaattaaggtgttggtagggtcgtgtttttttagaaggtttttgggaagaatttttttttgtttttttcggttgtcggtagttttaattttggtttgcggtagtataaatttattttttgtttttgtttttaattcgtttttttttttgtgtgtgtttttgtgttattatatgttgtttttttatatagataggagatttattatttgtgtttttgtgtttaaattttttttttttttttttgtttatttgtttgagatagagtttcgttttgttatttagaagtttaggttgtagtgtagtggcgggatttcggtttattgtaatttttgttttttgggtttaggtgattttcgtgttttagttttttaagaagttgggattataggtatgtgttattatgttcggtaaatttttgtatttttagtagagatatggtttcgttatgttggttaggttggttttaaatttttggttttaaggcgatttgtttgttttcgttttaaaaaaattgtcgggattataggtatgagttattattatgtttagttagtttatttttttttttttttttttttttttttttttttgagatggagttttgttttgttgtttaggttggagtgtagtggtgtaatttcggtttattgtaatattcgtttttcggtttaagcgatttttttgttttagttttttgagtagttgggattataggtgtgtgttagtatgtttggttaatttttgtatttttagtagagatagggttttattatgttggttaggttggttttgaatttttgatttcgtgatttgttcgttttagttttttagagtgttgggattataggtgtgagttatcgtgttcggtttattttttttttttttttttttgagacggggttttgtttttgttgtttaggttggagtgtaatggcgcgattttggtttattataattatcgttttttggtgattataggtgtgagttattacgtttggttttggtttatttttttttataaggattttagttattggattagagtttattttaatttagtatgatttaattttaatttgattatatttgtaaagattttttttttaaataaagttatagatattggggattaggatttaaatatatttttttgggggatataattttattattatagggaataaataggataagaaaattatagaatttagtaggtggtaggtgatataagttaaggggtgttgttatgttgtttaggttggttttaaatttttggttttaagggatttttttattttgttttttaaagtggggatgaaagtttgtttggggtattgtagttttagataggaagattagggaaggttttattgagaaggtgatatttgagttaagatttaaaaaggtacgaaagtgagttatgtggaagttttggggggaggagtgaattaggtagaggtatagttgggtaaagggtttgaggtgtgattatgtttatggatttgaggaattttaaagaggttgtgtgttgtaggagagtgaagggtagggagtggtaggaaatgaaggtagataggtagtagtggggaggacgtaggggtttagtttatgtaggttttgattggatatagtgagttttagatgatagttttttgttttatggggtagttttaaagttataggagtttggtgattttttttttttttattagatatttatgttatcggggtgggtaagttggatgtggattggagagaattgaatgagttagggtttaagaaggatggtgagaggtatgtttttattttgtaggatataaaggttttgtattaggtttttgaatatatgttgggtgagtgagttttgttttttttggtgtggggaggatggtgaggagttcgttaaaggttcgttttgggaatttggatatagtgttttttatttgtttttttttttatttgatttttatatttatagatgtttttaagtttatagatattatttgcggggtggggaatatgttagtaaacgtttttgattaggagaggatattttggtatgttattattaaggtattaggaaggaggggtagggtttggattttagaggtaaaagcggttatgggttagatatattgtaatttttgaaaattatttgtttttttgtagtttaagagttaagagatttgtcggggggtttttattttcgattaatgggttttgatagtagtttattgttttcgcgatggtaacgattattttttgtggagggttaatgtgggtaaggtaggggatgtattagttttttgattttgaagttatagattttattattttatttagtttttggtttttgtaggagttttggtttagtttaatttagtgtattatttttaggagattttaaattttagtggggtaaagaattttttattgagaaggcggtgatttttttagggtttgatgtttttgttaaaaagaattagggaattttggagttttatggtgatgatatagttttgttgaagttggtttagaaagtaaagatgtttatttatgttaggtgtttggagtttgggatgggagggtgttttgtagggaagagtgttttggagatttttggaagagatattggggataggttggtgtgatttttgtttttttttttaggtttatttgttttttttgtacgatggaggttaatttggttttgcggagattttaaggtagtatttgtagggattatggtgagtgttgggatttatggtgtttgagagttggggtcggggtttgggggtgataataaggattaggttgtagtttttaagttaggaatttggattttgggtaaaaggattagtattaatattttttttttttgattatagagaatgaattgttgaataaatagagtgtttttgtttattttgtcgttttgaatgggagtaaattgaatattaattttaagatgggagtggaggtgagggttttaggttggggatgttgggatttttttgtgatagtttttagaatgttttttttttttttttaggtttggttgttttttttttttgacgcgggttatttttttttttaagttttataaatttgttaggtgtttttgggtttgtttattttttttttgttgttattgagatggagttttgttttgttttttaggttggagtgtagtggtacgattttagtttattgtaatttttgttttttgggtttaagcgatttttttattttagtttttcgagtagttgagattataggtgtttattattatattagttaatttttgtatttttagtagagacgggatttcgttatgttggttaggatggttttgaatttttgattttaagtgatttgtttgttttaattttttaaagtgttgagattataggcgtgagttattgtatttattcgggtttgtttattttatttttttttttggttttatttttgttgtagtggataagttgtgtcgaggttgttttttaagaaaaaattatgttttttaatttgatagatgttagggaggtggtgatagattagtttttatgtagtgggatttaggaggatgagagtttttgtaagggtgagttttttattatgtttggatttttaaggggaaggttatttgtgtttttgtggttagtatgtatgttagaatattagtttattgttttagatgatattgttttttgttattttttgttggtaggagaatttgggggagtagttttttttgagcggagatttaggtttttttaggtgagaaggtagaagtttgtaggatttaggggttataggattttagttttgttggggggatgagggaggtttttgagggatttagggaggttggggtttatagttggggttgtggtagttttttagttagttttttttttttttttaggtgggtttggtgagttggggtttttataatttttgttttggttttgttgataaaaattttcgtaaaagggtttttcgtagtaaggtttcgtcgttacgagatttttatattaatttttttcgtatgtagttttggttgaggtagtatttgggggatgttttgaattttttatttttttagttatggttattgagttttttgttgttttgttagaatttgtcgtttttttattttttatttttgaatggttatttttagattttgtgatttatttttttttttagttgagtaaattcgggtttttaggatgttagaggtagcgtatataagttgggaaatttttagggtttttattagtaggattgtttcgttgttttatttttcgttttttggtttgtttttagattttttttttggttgatttgatttatgtttgttttatttttatatggaattttttagttatgaaattaataaaaattaatggtttttatattttttagtgtttttatttggaggttaggtagggttggttttgggggagggggaggttagaatgattttaagagttataggaaggtaggttagagattttattggataaatagtggttggattttgtattataatatataattaataggggagtgagttggatttttatttttggtttttaagtgggtggtttgggtttattggggaggagttaaggtcggagaggaggtattgaaggggagagttttggatttttggtagtaaagggtgggatttttgtagtttttgtttttttgattggtagtttagcggggttttttcgtttggatgtttcgggaaagtgatgtgggtaggataggcggggcgagtcgtaggtgttagaatatagattgtataaaaggttgggggttggtggggagtaggggaagggaatgtgattaggtttaggtttggagttttagtttggatattgagttaagtagataagtaaagtaagttaggatatattattttgttttaggtttagttttttttttgttttttaacgttatggggagtaattttagtttttaattttgtttgatgttttttattttgggttttttgtttggaggtaagcgagggtaattttttttttttgttgtttttagtatttttttttggttttttggggttaggttttattagtttttttttttaggtgtgattattattttatggtttttggtttagttttagggattttgttttttggagggggtagagattaaaggcggtttttttcgatttttttaagagggttaggtattggagtacgtgtgtttttttggtttttattcgtattttgtgtagatacgtatttgtagatttacggggttttggagtattttgaagatttaagattaaaagattgttaggaaggtagagtgtagaggtttgagggtaatgagtgtgggtagtggtttaaggtagaaatagggtaggcggtagtaaggttaggattaggatgagattaggtagggtgataaggtgggttgatcgggagtaggagtagttttagggtggtaggcggaaagggggtaagaaaaagcggagttaatttttattaagtatttattttgggtttttaggtagttttggaagttaagagaatatttagaaatggggagggagaagtagtggaaatttatatgggttgaggagtaggtaagatgttgtttttgcgggattgggaatgcgttgttttttagtgatatggttttcgagattaggagggatatatttaaggtagttttttttttttgatgatttttatttgttttttttttttaaagtaatttattgtttaagattatacgatttcgagaacggggaatattggtttcggtttttttattataatgtgagtgatgagatttttttttattgttatgacggttatatttttcggggttttgttaatcgtatttgttaagtgaatggtcggtggagtgggtagatagcgatttgtgataacggaggtgagaagtattttttttttttatattgttgtttttttgacggcgtttagttcgaggagtgggtattcggtttcggatattgtaatttttgttttttattttgtttacggggttttaggttttagtgtttatttcgatgttttatatttttgtagcggggtattgttttaattcgggtatttttattggtataaggaaggtgggtagttagtatcgttttgaagatagcgttatttattattgtagtcgggggtttattttgcgtggtttttagcggcgaacgtgttaggaaggtggtttttggagcgggacggagtttttttgttaaggtgatttttgatttgtatttttaggttagattttggttttttattttattgttttttttttttattttaattttgttttttttttattttgtttaaatttttttgtataattattttatttttgagttttttatattttggaaatttatgatttttcgtttttttggttattgtatttttgatatttttagatatttgattttatttttgatttttttagatttttttatgtacgatattttttaagaggtggtcgaagtttttttgttttttttgatagagattatagaaggagtcgatgttgaggatgggtacggtttaggtttgaagatagagaagggaggtagggtagggaattgggggaaaatggagaagggatagaattgttaatgttggagtttgagttatttttttggtatttaggggaataatagaagcggaagatcgttttggattttttaggttttatgaatatttatttggtgttagatggattagatagtattggggttagtaattttataggagttaaaaagtgtttagttaatttaattgagaaggtggaatttttttatttttgaattcgggggaatggaatttcgttgattttttaggattagttttttgattattttagtttttttgaataatagggttttaggaaaatttttaggttttattttgtttttttttttttttatttgaagtagttttttgattggtaatttttttatgaattttagtttttgagttttttattgagggtttttttgttttagtaaagtcgttgaaattttttaattatagtattttatttttaatgttatggcgttttgttttttttatttataggtggtaagttatggtgtgaagttaagatatggtttagtgatatatgttatatattttaaaatttgggttaaagtgtttgaagtagatagtagtaatgtagattgggttacgaagtagtttaatgaaattaattatgaaggttagaggttagggaatggtgggaggtttattttggggttaggaggtttagggtggagggggttatgagattattttgagggcgatagggaggattattttgtagttaaaggttgaatagtaggatcgttgggtaatggaggttagtgggaatttgttgggggttggaagggttattttgtggttaaagggaagttcgtgtaatgatgattaatttaaaaagttgaaagatgtgggattttagttgtagattggtttttggggttaaaagatggtttggaagattaggtgaggtgatggttttttttttttttatagattataagttgaagttagggattaatattaagaaggttttttaggtagtgtatagtatgatgagttggttagatgacgttttttttgaaggttggaatcgtattcgttatgttattatttttatgattgatggttagaagggattttttttttgttttagtttttttatttttttagattagtatgtggtttttaagtttatttgtaatattatatttatggttggggttttgaatgtgatttatagttggttgtttattttttttgtgattttttataaggaattttttttaagttttgtgattaattatttttaatttttttttaatttgtttattttgttacgtgtatttttgtttttagttagtttattttttttattttttatttttatggttttgttttttttgtaggattgtataatatgggcggggatttaattattgttattgatgagattcgggatttgttatatattggtaaggatcgtaaaaatttaagggaggattatttgggtgagtaatttgtttaggatttagtattttatttttttagggtttggatttttattttttttttttattttttagatgtttatgtgtttggggtcgggtttttggtgaattaagtgaatattaatgttttggtttttaagaaagataatgagtaatatgtgtttaaagttaaggatatggaaaatttggaagatgttttttattaaatgatcggtagggagatataagggaataaagaatataattttttttaggtttttttgaagtaatttattttttttttatatttgaagttttagttgtttggaaagttttttttatttttttttttttattttagtgttattatttttgttttttggtattgtttatttaattttagaattatagagttttgagtattttagagatttttttatagttttatatttgatatatgtggaaatagaagttaaaggaggttaagggatagtaagttagtaataagggtgggtttgaaaatagttaggtttttgatagtttgattttaagttttttttttttttagtttattatagtagtttttttttaatacgaggaaataaatattcgtggtttttttttttttttttttgggtttttgttttttatagatttttatttaaaaggttgttgttatttgggaatgaagtgtttcgagtttttagtatattttttttttttgttagatgaaagttagtttttgagtttttgtggtatggtttgggaatataggaagggtatcgattattataagtaattatggtaggttaagattttagttattgtaagtatagaattttagtagtggggatttgggggaggtgaggttaaggtgaaatgggagtaggggaaggaaaaaatggttataagagatggtggtttgtgaaagttgagttttttttttttattgttgtgtttttagcgttttttaaagggatacgagagttgtatgggggttgtggtgtttgagtattttgtgttgatagtagtatattgttttattgtggatgataaggaatatttaattaaggttagcgtaggtaaggatgtaattgaaggttttgggttgtatttatgttttttaggtaatattttttattttttatagattttatattttatttatttttaatgtagttttattttttgtattttagattagttagggatgggggaagacgtgaagttaggaatgatacggggttagaggtaggaagttgtttataaagaggtggtatttatttttttattttaggaggggagaagcgggatttggagatagaagtagttttattttattttaattataatattaatgggaaaaaagaagtaggaatttttgaattttatgattatgacgttgttttgattaagtttaagaataagttgaaatatggttagattattaggtgagagcgtttagatttttgaggaaaggttgggaaaggttggaggattggggtgaggagtaggtttggtttgttgttttttttgttttttataggtttatttgttttttttgtatcgagggaataattcgagttttgaggttttttttaattattatttgttagtaataaagtaagatatatttggtaagaggataaggatgagattttaagagataagtggggtatgagagggaggtgtaataggaagagatgatgtttggtttagaatttagttttagaagggtttaggggatatttattgagtgataaaggtaatggggagatgatagtggtgggagtagttgaagtgacgtagtttattcgtttagaggaagagttgttttttgtataggatattaaagttttgtttgtgtttgaggaggagaaaaagttgattcggaaggaggtttatattaagaatggggataaggtgagaaacgggtattttaaggaggtattttaggttttaattttttttaagttatttttgtttattatttttttatgttttttattttttttatagaaaggtagttgtgagagagatgtttaatatgttttaggttatgataaagttaaggatattttagaggtggttatttttcggtttttttgtattggaggagtgagtttttatgttgattttaatatttgtagaggtgagagaatgttttttggttgtgttataagtgtttaaggtttaatagtttttttttttatagttttttttttttttgtaggtgattttggcggttttttgatagtttataagagaagtcgttttatttaagtgagtttttttttttttatttggggagatgttaagtggttagtatgggttttaaagtaggaaagtttaatgtatgtggttagtaattcgaggtaggtagagtttgttttattttaggatcgtatgttttgtttgcgtgtgttaagaacgaggttgagttgggtttttagtttgatttttttaggttagttaagatataagtaggaatagttatgtttttaggattaggaattttattgaatgatttatggtattttattgtttttgtaggttggtgtaattagttggggagtagtggatgtttgtaaaaattagaagcggtaaaagtaggtatttgtttacgttcgagatttttatattaattttttttaagtgttgttttggttgaaggagaaattttaagatgaggatttgggttttttataaggggttttttgttggataggggcgtgggattgaattaaaatagttgcgataatatttgtgttttagatttttttggggtaagggagtggggaataggtattggttatgtcgttatattgagattaaatttgatagtcgtttttaaaggtttaattttaattttaagtgttgaaaaattagaggttgagggagatgtgtaagtttttattttagtgttttattgagattagtattggggtatatgaggtataaggaatttagttttgttttttagaagttatttataaggttttttttgtagacgttattattgtagataatttgggtttttttgtttcggtggtaatttttagggttgttttggatagttagggagggaggagaggaatagttaaggtttaaaggagattatagaatagattttgaggttgatttttgattattttatttttggttattggtttttggaagtttagtttttacgttgttttttggtggttaggatggtttgttttttttagtttttttgtgttaatttatggttaagaaaagtataagtggatattttgatgaatgttttgtttttagaaaaattttaaatgttattgttgagatacgtgaatgatattaatttattatttatagttagtatgttagaagttaaaaattagaaaatttttgtagtttttttttgatatgttggttaattttagttttttttttttgtttgaagggttattgtagttgagtttttttttttgtttattttttttttaggaaaatttatttttagggaaaatggattatttatattaagaaatgttattagttttattagaatttatttagggtgtagttttggtttttattatttttttttaagtttttagttgttttttttttttttttttttttttttttattagatatgttattttttttattttatttaatggttttatttttattatttttgagttatagagaattttttttatttatttttattttgtgatttttgtgttttaatattgttggttatttttttttttttaaagtgtgtgtttttttgttttagtggtttaggtttttgcggtgttgtttttagtttttcgatttttttttttgttttttttgttaacgttaggtttaacgttagtttaatatgttaggatagttggggatatgtggggtgtgaggtgaatagttttgttttttaatatagttttagagtattttttaaattgagttttgggtcgtttttttttttttgaaattagagtttttttgatgattttattgtttggtagttattttgtgatgtggatgatttaatttatgttttttttttttattttatatttgagttttagatttttgatttcgaatatttatgaaatttattttattttattttaaaatgaataagttttatgagatatttattttttttattaattttattttagtttttatttttttttttgttttagttattgttttggaagttgtttttaattttttttttttttttttttatttttaattgatagaggatttgaaatttttttttttatttttatagttttcgtatatattttgatttcgattatttttaggaaatttaaggatgtgtgggggaattaaaaggaatggtttgtgggggagaggatgggaaaggaagaattttatttttatcgagggagttttagatagatttgttagtagcggtatttagtatgggttgttttcgggttatgttgattttgagttgtatagattttatttgggtttcgttgagttgaagtagaagaggggaggtagaggatggggaggaaaatattatagataaattaaagaagttattttaggagttgttattttaggaggagattgaataaggaatttgagaatgtgagtttttttgtgtgaatagggagaggttttttttattaagaggaattaatttttttttggtatttagtattttgaggagaatatatgagaatagtagaagcgatgggaagaatagatttgggaagttttaattttagtaacggtttgatttgttgattttatttttttataggtgacgaaggtatagttgggataagagaaaatacggttagtggagagttaaggggtttttttggatttaattaaatttagtgataataggcggttgtagggagggtagtttttttttttaggttttatattttaggatttttttaggattttttattatgttttgttgttatttttattttttgggtgggtttatggagaggttaatgatgtttttaaaaggagagaaggttttacggagaagggtgggtgttatgttttttttatatatatagagagtatttttttttttaggggttcgtcgtttagggaatgaattcgattttttgggagtataaattatagttataagatatagtttatgttatattttatttagtaggatttatataaattttagttaaggttattttgatttttagttaaaattatttattgcggaaaggattttttcggtttcggtttcgatttcgttttcgatttttgtttcgttttcggtttcgatttcgatttcgatttcgatttttgtttcgttttttgtttttgtttcgatttcggtttcgatttcgttttcgatttcggtttttgtttcggttttttttatggttgcggtttcggttgcggtttcggggaggggaggttgaggagtgggtattattgcgttttttatagttttagttaaagtttcgagggggattattattagtttttgggttttttgttttttttttatttggttttagttttcgaagtcgattattagaagatataaagttggggagatgtagattgaagattaaaggggggttttattttttttttttagattttgtggagatttaatattttttttatagtttagtttttatagtttaaattttttaaggatttaggtaattaattttattaaatgggtttagttttatttttattttttaattttttatatagagattttttttggggacgtttggatgattgtaaaagagattaagaatagttaagatgatttttagttgttgatatgtggtttaaaatatatttgttttttatatttttttatttttaattttttagggatagaaattaggagtttttattttttgtaggttattattagtagatatgtttttttggaacggttggaaagtggggattggttttttttcggggttttggagtggtgagagatttattttagtgtggagtaggaggttgtttaattatggattagaggtgtttttttttttttatttttttttaggttttttttgattttttttttttttttaattttatatatattttttatttgacgtggttttatttatttttttttttttttttttgagatacggttttgttttgttgtttaggttggagtgtaatagagtaatcgtagtttgttgtagttttgattttttatgtttaagtaatttttttattttagtttttttagtagttgggattagagatgtgttttattatgtttggttaatttttgtatttttttttttttttgtagagatagggttttattatgttgttagggttggttttaaatttttgggtttaagtaatttttttatttcggttttttaaagtgttgaaattaattaggaatgagttattgtcgtatttgttattgtggtttgttttgttttgtttttgagatagaattttgttttgtcgtttaggttggagtgtagtggtgtgatttttatttattgtaatttttgttttttgggtttaagtgattttttggttttagtttttttagtaattgggattataagtgtgtattattatattttgttaattttttttttttttgagacggagtttcgttgttatttaggttggagtgtagtggtataatttcgatttattgtaagtttcgttttttgggtttaagtaatttttttgttttagttttttaagtagttgggattataggcgttcgttattacgttcggttaatttttgtatttttagtagagatggggttttattttgttagttaggatggtttcgattttttgatttcgtgattcgtttgtttcggttttttaaagtgttgggattataggtgtgagttatcgtgttcggttttatattttgttgatttttgtatttttagtagagacggggttttattatgttggttaggttggttttaaatttttaattttaagtgatttgtttattttagttttttaaagtgttgggattataggtatgagttattacgtttagttggtattttttataagtgattcgatatattatgtatttagtttatttgaattttttttgaatttgataatatttttagttttttttattttttagggtaatatattttaagagttttaatttaaggtggattagaattatagaatttgtaaaatggagaatttaggagtcgtttagtttttttattttatatatgagaggtgaaatttagaatggtatagtaatttgttagtgtttgagtatgtatatttttttttaaatttatttatattttaatttggagggatgttttttaaataatttttttgtttgtgtttatttttaatttttttttaagggttcgagaacgtttgaagtttgagtttttggttttagttttgatggtattgatggtttttgattttattagttgttttgtttgttttgttgttgtggttgtgtttatgataggttgttttgatagtgttggagagataaggggaagaggtattatgttggttaagttatgatgaaggttagttttatgttgtttatttttagtttatttttattttttttgttatttatagcgtttgatattattttggttggttgtgttgttgttattttgtttttttagagttagtaatgtttttttttgggaataagggtgagaagagagaggtaagtgagggttagtttttagtcggttttttttttaaggtttttgggtatattattttagggattattttttttgatgtttttagagtggtatattgatgtgttttgttttttgtttttggttttttagattatgtatgatgttggaaatttttaatttaattaaattacggaatttagaggttttttagagtgttatatttttgaagttgaagataaataatttaattatggattagaattttaggatataagttgtaagtaagtataagtttatgtgttttttttggaagttttatttatttattttttgtatattgaatgaggtttagttatgatttcgtaatagggatatttaggaggttaatgtattgtttttatttttaagaagtttatagtttgagaaataaaatatattgagttagtaatataattataagaggtgtagattatttatagttgaaagttagtaagattttttgatgtttaatggttattaaattaggttttttttcgtatttttgtataatatagagaggagaagggtattttagaaaaagaaaatagggtggtaaagatgtagagataagaaggttttgggaatgtattttttggaagtagtgaatagttttattttattagataaggttgttaaattaaggttttgaggtttttttatagataatgtgaagttatttatggtttttgagaaatagagggagtagaattttgtgtttttaatggattatttgaataggagtgaagaagtttgtttaaaaaaaaagattgagaaatttgttgagagattattataatggtttatatgaatgttaataaagttttgttcgggggaatgtatagtgaagaataaataggaaaaattattttaaaagaagaaataataagatttggtaaaggtttgattatgtaaatagtggggaagttagagttttgagtttaaatatgtggtagaattggtgtagttaattttatttggaagattaagaatagaaagatgatagttttaatattgagtatttgaagttttttagtataatattggatagaattggaaaaaataaatttggggattattagtttttaagcggtattaaaagttatgggaaaggaagataatttatggtaaattgtatagaaaagatagaaggtttatattaaggtttgggaaagtttatttttcgaagttatattgtgaggtgatatgtttttaggtatgggttagaaaaatttttttattcgtttatatttattttatatttttttagagtgtagagtttgtgaaaggttaggttatgtttatatatagttttttattttttttttgagtttgttgaattttttttgtagagttttttttttttcgtttagttcggggggtattattaatatggtggtttttagtttaggggtagggtttaagatatttttttttattgttattattcggggtttatacgtcgtttatattgtatttaattttatttttttaggtttgtttatttttgtttttggttttttttattttttgtttaaattaggttgttgtttaagttttcgttggtcgggattatttagtatttttttttgtttttagggattatagatattagtatttttaggtattatgtggtttaaggagggataaatatttatttcgtcggaaagacgatggtattcgatttttttattttcgttagggtaaggataatcgcggggtttgaacggtagagaaggcggtggagttagcgtagcgttcgtagagtaacgtaaagaggaagaatagagaaacggttatgagaaaaagggtcgaagagtgagaagtagagggttttattcgagggggcggtaatcgggggttttacggttttcggtcgcgttcgcgttggtcgttgatagcgggtttataacgatgacgtagcgaggagcggaaaacgcggtaattaaggcggttttaggcgcgtattttcgttcggttttttatcggtttaggtttgttttttcgtagcgatagtttacgttttcggcggggttgtatcggaagttgtttttattttcgttcgtttcggggcggggtttatttcgtagcgattatttgtcgtattttcgggttgttaggtagttgttgtggttttaggatgatggagatagagcgatttggtgagggggaggggagggaaatggaacggagtagtcgatatggaatgaattttgatttttgatttttgattttttttcgtagtgttattttttttagattttttggatttattttttcgggtcgtggagttcggatgtacggggtattgggagttgttgaatttgtttggagttttagagagtagcgtgagtgatttttgattttaatttttgattcgtattgagtttaaattttttttattttttttatagtaggatttagtttaattttgtttatttgtgtttgtatttttgtttattttagtttgaaggggtgttggatagattatagtttagtgtatttgtagtacgtgtgaggatagagtagaaagggttggggatatttttgttttgagagttgtttttttaaatgtggtattttttcgtggagtttttttttgtatttaagtattagggtatttggtgattgagatgataggttttgagtttttaattttttatttttaggtttgggatttttttttttaaaattagtgagtttttaattttagtgtgttttatgattagttagggagttttttaaaaatgtatatttttaggtttagtttttatgtttttgaaatttaaaatttgttttaggtaatttagtagtaggtagtttttggttaagtttgattgttttagtttgtttgatatatttgttatttttgatttgaatataagttttattattttttttgtttgtattttattttttttttttatttaatgttttttattttgtttttgttttagtttttttatggtttttttttttgtgttttagatttgtagtaagaagtagaatagttgtttttgttatttttagtttggttgtttttgtatggtgtggagtatttagttcggtgaggagtttggaggggtttagattagggtgatgggtttttgaaggaagttgggatagaggaagaaagaagatttaaaagttattatttttttttttagaaaatggtagaggaagacggatttttggttttttttggttgttttgggagttttagttttattcgatttataggtttaaagatatttaattataggttagatattgggttataaagaggtaggaggttaggggttatgagaaatagttggggagaaggggaggtggttagagataagtttagttttattggggttttgattttttgttttaggttttgttggagaatataaatttttcggttataatttttttgttttttcgtcggtttttagggttagttttttagtttttatggggaaatttaattcggtattttttttggttaggtgatttttgtggagatgggatggtagaagagggtgtttttaatttttagggaagggttttttatttatttcgtattatttttattttatgaatttttgtttgttttgtttttttttaggggggatggatgaatttattataatagatttgaatatacgggaggaggttgaggaggagatagattttgagaaaggtaaggtggggttttgagtttgagttttgaggaggaagagtttaggttattattgggttattgttagtttttttatgtttttgagaaaattagaaaaagatattttgtttataataatttttattgttatttgttgggaaatttttataataatttttattgttatttgttgggaaagtgttatagtaaatatttttatttatagtatttgttttgtaaatggtattttttaggtttatataatgtatataatttgtttattagtgtgtagtgatttgattttatgtttttattttatagatttttttattattttatttggttttaagaaaggtatggattttgtattaaaaggttagttttagtttttgagtggggtgtaggagaagttatgttttttttttaaggaatagagatggatatgataaggttgattttgttggtttgttttttagattgtttaattttagtttttggattattaagttttagttgtttgttggagtttttggatttgggtgggggtgacgaggatgagaatgaggtagtgggatagttaggaggttttagaggggatattgttttagtttttttttgtagtgtttttttggttcgagtaagtagtttggaagatttagtgttgaaggttggtggttttgtgtagtggaggtaagaaagagttttgttattaggatgtgggttggttaggatgggtttgaggggaagaaagggatattttttgggaggagtgttaattgagagttttttggttgtatttttattattgttatttttgatttttttaggaagcgtttatagttgtatttattttagaggttttagagtttttattttaggagtagtgggttatttttgtggacgttattttttttgttggtgatttttatcgttttattttttagttagttttttaggtattttggttttatttttatacgtttttttatttttttttgggttatatttttagtcgattttttgttttttttattggttagaggttagatttattttaggttagttttggtatttagttttagtttcggttggtttcggtttttattcgttcgttttgcgtgttttatgagtaggaggtagtaaggtttcgtttttttttttagtttttgtttattttttttttttatagtgggtatttgagttagatgtgttttagaaataggttattttgtatttggaacggtatgattttgtttttgtcgtagtttatatatttgtaggaaaaatagttgtggttgaatatgttattgttttggtttagaaatatatgatacggtatgagtttttttgttaatttttttttttattagttagttttatttttttttgtattttttgaaaattttatttttttttttatttttttagtttattttttaagtgagaggtttagggttaagattgagataagagtttagagagaaatgaaaagatatggtggggagaaagtttagaagaatgatttgggttagtttaggaaggggttggggatagaatttttttggggttatattatgtaggagaatgtaagggtagtttgggtgaagaagaggagtatttgagtttttggggtatgtttttacgagggttttatgtgggagaggaagtgcgggttatgagtttgcggagggattggttaattttatgttttttttttagtattatttatatttcgtttattaaggttttgagtaattagaagtttcgggattttcgaaatatattcggggatgtggggttgtttatcggggatgtatagttgtattcggaggttttttgttttattatgattatagagatttttcggtgagagatggatatttaatataggggagttttggttgggaagatgtggtcgttgtggagagtgtgttgtttgaggagggggtggagacgagttattggagagttaatttttggttttttttttttagttttatgttgtatagtggtttagatgttattcgggatttggagtgggttatttttgatgaggtttattatattaacgatgtcgaggtaagggttatgggttttttagaattcggtagtttttttttttgggattagttgagcgttttttttattttatatatttagggttttttattgttttttttatttttatatggaattttgtgtttttttatgggtagaagggcggtttttgtttttatgtgattttttttttttttttgtgtttagcgtggggtcgtgtgggaggaggtgtttattatgttatttgattacgtttttattatttttttgagtgttatcgtttttaacgtttttgagtttgttgattggattgggtgagacgtgtgtttcgggttgtttgggtgaagggggttatagtattttttgattcgggtgggggattaagtttattatagtaaggagagcggttaggttttaggggtgatgttggggaatatgttttatttggtggttgtgggattttttttgggtttagattattttgtatgttgaaatgggatgagatgttgggggatagttttttattttgggttttagaaaagattgggtaaagttggaggggtagggaagggggtggggatgcgggtttttttttacgtttttatttttgatttgttttttttttttttttttaggcggttgaagcgtcgttagatttatgtgattagtattgtaattcgtttcgtgtttttggagtattatttttttatagggaatagttttaagatttagggggagttttttttgttgttggattttcgaggagttttttatataaaagggtaagtttcgagatgggggaaagagttagggttgggtttttagttggatattgtggttatttttttttgtgttttaggtattatgtagttgtggaggttaagaaggagagaatgagtaaatacgtttagatttttggggttaagtagtttatatattaggggggttttgtataggtgagaattgggagggttttgtatttgttagtatttgtttttttttttattttttttttttttttgttttttaggggttttgatttgagttttgagtattgttttagttaatattagtttattttttattggtttaggaatttaatttttgttttttttttttttttttttttttttaggatcgcggagtgtatttgttttttttggttttttttcgtatacgtgtttagttgttcgtggtggtgtttattttttttcggggtcgttgtgatgagtaggttttaggttttattttttttgattttattattagttcggagaagagcgagatttatttttttttgtagcgttgttttgttcgttttcgtggttttgatcgttagttgttttaggtgcgtttgtgtgcgtttgtgtgcgtgtatgtatatatttggtagattggtggggatagggtgtttcgagattttatttttgattatgggtttttttttattaaaggttttgtatatgttagagtttttgaatcgcggtttgggtgtgtattatagcggtattttgtttatttttaaggagatcgtggagatgttttttagtcgtggtttggttaaggtgtatgtggtggtggaaagggattttttagggtgtttgttgtttatttaggggttgtttagagggtagaggggtagaggtttaggtaggttagtgttgtggttaagaatttgggttttggatttagattatttgggtttgaattttaggtatattatgtatttatagtattattttggattaattatttaatttttttgaattttaggttttttattttaaaatggggatgtataagatatgaatacgtaggttttagaaaagaaatttaggaagttagtaagtattcgaaaagttattagtaattagaaatatataaattgaagtatttataagatacgattttatagttattagattggtaaaatttaggaaattagtttatgtcgagtgttgttagagatataggaggttgtagggttttgggaattttttacgggatgtttagttagtttggaatgtacgttggtattatttagataaaataattatattggtcgggtatggtggtttatatttgtaattttagtattttgggaggttgaggtgggtggattataaggttaagagatcgagattattttggttaatatggtgaaattttgtttttattaaaaatataaaaattagttgggtatggtggtaggtgtttgtagttttagttatttgggaggttgaggtaggagaattgtttgaatttaggaggtagagattgtagtgagttaagatagtatcgttgtattttagtttgggtaatagagggagattttattttaaaataaaaataaataaagaaataaataaaaattatattatattttgagtttatattttatttttgggtatatattataaagaaatttttattttggtttgtgagagaatatgtatatttattttttgtttgtggtggtatggtgttggtagtattagggtgttttttattgggagagagggaaggttagtgtgggggatgtatttatagagtgttttgtagtagttggaagtagtgggttagatgtggttataggaatatggataaatgttgaaatattaggtggagaaaaagaagtaaaaaaaaattagatatataattattttttatatgaattataaattataagtttataaaagaagatatgttttataagattatatttatataaaaagatatttgttggatatattggaatgattgtagttagggatgggaatgggatatgaaggtaaaagttaagaaatagaaataagtagttatataagtaaaatgaggaaaataataatatttgttttatagatttgtttggagagtttagtgagattttataagtaataattgggatggtgttttatgtttataaagtaaggtgggtttggttagggttgggggtgtgtgtatgtagagtttttgttgattttttttgtttttttttgttttaggttttgtttgttatagagatttttgttatgggagtaaatatgtttgttcgtatagtagtgtttgattttatgcgtaaatacgatggttttatttttcgggatttgttttttggggagtatgtgtagatggtaggtcgggtagggcggaggggtttggattttataggtatcgttattttgttttgtaagggtcgagtgttcgagatggtagatttgtatcgtatgatgatggtgagcgggttagtatgttcggtagggttttagttttaggattttgttggattttgttttcgattttttttttttttttttttttttttttttttttttggagatagggttttgttttgttatttaggttggagtgtagtggtataatttcgggttatcgtaatttttgttttttaggtttaagggatttttttattttagttttttaagtaggtgggattttaggtatatgttatataggtttggttaattttttttttttttttatgttttgtagagatgaggttttgttatgttgtataggttggttttgaatttttgggtttaagtagtttgtttgttttagttttttaaagtattgggattataggtgtgggttatagcgtttaatttttttcgatttttttgttttgtttgggagaagttgaggtaggagtgagtgaatttaaggatgagattggagtttattttttttagtttttttttatgtgaatatggagttagatggggtttttgagtttatttattttagtttgtttttttatgttatagaagaggtgagtaagtggtttgtttaaggttttatggttgtagagttaggatcggatttgacgggagtaggtttagtttagaagattggttggggtttagtaggttttattttgattttagtgatttttgtgatttgattttaggggaagtcgttttagttgtagttttagtttcgttttacgtatattatgatttttaatttgttgcgagtggatgtttttagggtggaggatatgatgaagaggagtttttttgagtttttttttcgtaaagatagtaaggtaaggagtttggggtaattagtgtgtggagtaggaggttggttaaagataggttgggaataggtaggtatttagaggttagtgtgttgagggtggggagtgtgatagattgggtttggagattttttttttatagttttttttgtttttatttaaggtttatgaataggttttggttgaattgattaagaggttgggagttttggaggagtttgatatgattggttaattggtcgatttgtttgaatattatagttggggggaggaattgatagagatttagtatatgatttaggtgagtaagtgtgagtgttgaggaggtgataggagaagggaagagaagatcgtgttattttaggtgttattaaatttagtttaagtgtttgtttttgtgatgtttttttttatttgttttttgttttttagcgacgtattatggagtttgtgaacgggttgaagttttttttagtaggaagggtggtggttgtgaagaattaggagtattataacgtattgggagtgattttataggtgagggtgatgggaatttggattttagagggtgggagggagtaagttttttttttattttttttatttggttagggtaggttgcgttattatagggtttttattttttttttttgtttttttttttattttttttttttattattatattatgtttattttttttttttattattttaagaagtttgttttgatcgtttgatttggttgtttttttttattggtgagttttgtatggttgttttttgatttttgtttaagggtgggtatttggtttttgtttttgatgtttatttattatattttttttttttggtttttttgattatttttaggttttttcgaattttattagtagagtatttataattttggttttgtgtgataagtttttgttttaggatttataggatagggggttagttattgtagaggtgttttatttagatgatttcgtgggatttaagttgtttttgtttgaaggtgagagtgtggtagatgtttgttttttgttagtagtataagtaggatgtttgggtttatggtaatgtttgttttgtttttttttttttatagggttttgtgattatattatggttaagttttagttaggagatatggttgttattattattaaggtgtttcgggtgaatggggagaagattttggaggattttagtaagaggtagtagttaaaatttaagttagagatgttagggaggttttttttttttagaggggtacgtagaggtagggaggggtagtggtttgggagttttttttagtttgagggagattatgaagtggtggggttgtagtgagggggtttttttagtttaagggagattgtgaagtggaggttgtagtaagagggtttttatagtttgagggaggtttttgggggagagaagattttattttagattttaagatttgttttttttttaggaaggattttttttttgtagtcgtgattattgttgtttaggaattgttgcgtttggtttaggtttatttagtcggattttttattttcgattttgttaatgatttgtagtttaaagatatgttagttgtagagggtgggtttcgggttcggaagttggaggagttgatttagggggtttagtgtgtatatagttttcgtttttttgtttaggtaggattttgggtggtaatttttaagttgggagtaggggttttttttttgtggttttttgtagattgatcgtttttattttagtttttgtttttagtgtatttttgttaaggggtaaggagaaggttgacgggtggttttttgtagtatttgaagttgcgggagcgaatgtagatatagaaggagatggagcggttgcgttttttattgtcggattagttattgttgttgttttttgagtattattagcgagtagaggtgggtggggtagtggttggggtaggggggttaggggatagtagtgtgtttaatgtttatttttttttttgtaggtgtttcgaattttgggttacgtggacgaggtgggtattgtgaagttggtagggcgggtggtttgtgttatgagtagttatgagttgttttttattgagtttatgtttgataatgtattgagtattttgcggtttgaggagattgttgttttgttttttggtttggtttgttagagttttggggacgttggggattagtttttaaatatttttaagtaggtaggggatattatttttttttttttgttagggttgtggtatttttgatttttatttttaggtagttttttaggtgattttttttagttttgtaagtgttttaaggatggaaaatggttgtttttttgatttggtttttttttgttttggagtaggaaggtaggttttaattttttttttttttttgtagggaatagaacgtgttcgggttgtggttaagcggattggtgaggtttaggtggtttgtggtttgaattagacggtggaggaatttgtgggggagttgaattttgggttggttgaggttgtatatgagtgggttcggggtatggtgagtatttgaggtttgggattttgtagacggttggttggggagaatttgtttaggttgagtgtatttagtttttattttattttttttatagttttttttcgagttggtagggtttttagggatttttgagggtttggtggttcgttgtatttagcgtttggttgagatgtgtcgtttattgcggggggtagttcgtttggtaggagagtttgtgttgggtgttaagatggagatagcggttattttgttacggcgggatatcgtatttgcggttagtttttatatttagtgaatgttttatgtaaaaatatgatgataaaatagtaaagtattgttgtgtgtttgagttgttggatagggatgatttagttaagaagatagcgagagaattttttagaaatatgtttttattatttgtatatagagatatgattgtttttttttaaagtattattatttgggagagggagttttggggggtgatgggaggttttgagttatagtttttatatattatatgggtaggaaggcgtaaggtgtattttggtgtatagatacggtgattgggtcgttaggtttttaagagaagagatgaacgagtttggggggtagatggaggtattagttgagggttagaggttggattttgggatttagaggggagggatagagttgaatgttttatttggggttattttggataatcgtgttttgggtaaagttaaggaaggcggtatagaagtttatgtatatagagggattttagtcgttacggttattttggagtaggtagaggaggaggtagaagatgggtagtgggggtggtgggaggagagaaggtaggttgttgttttggatgttagatttgtggttttggtgtttggggatacgggtgggagttgtaatatcgtttttttattttgatatatttaaatatttttatggtaggaaaggttttgagggaagagataaaatcgtttgggttacggaagttagtaataatattcgggatttttgggaggaatgattgagtttattattttaggagtttgtgtttgataggaaaagtaagggattagtgggatttttcgtgtattttttattttgtttttatttttttttttaagttttttttttagtttttaagtttaagttttcgttttgtttatttcgattttgaatttgtagaaatttttttattggttagggttgtgtatttttttggaggttttgagttttatatagtaggttgggggttgtgtggatggggtttgggggtttgtgtagtttattttttttgagaagagtagagggtggttttttaggcggttgcgtagtatagagtagaaggttacgttggtgttaatttttttagaggggtttggggagtttttaggtttgtttgtataaggagagaagtagtagtaggcgtggcgggtttttaatttttgggaaggggaagggggttatgaagtaggggtaatttatttgtatatatgtattgtttaaatttgtattttatgtatataagttttcggaggagcggtggtcgagtaagtttttgggttcgagcgttcggtgtttttattttatttaggtatagtgttttttggaatcgggaggttgttagttgttagtttttttgtcgtttatacggtgtcgttagtagttttgttaggtgttttcgttacgttattatggtttttgttagttagtttggatttttgagaggtaggagttataggttgaaggtttgatataagtattagtgagatgtttttttcgaagaatagttttgttttttttaaggattgatttttatttcggttttggtttttttaattttagagggtaggtacgggtttttagatatattgtttattacgttttgtttatttttttaatcggtttcggtgttttaggagttagtatagtaggtggtttagttttttttggattttttcgtttcggggttggtatcgattcgggtattcgtttttgaggttaaagttggggtttggatcgttagtggggggtgggttatagtagcgtagggttcgggtatttttatggtattggcgttgagtatttagggagaagtagtttagtttcgaagggcgtcggtagaaaggaaagggtttagagtagagggtagggtttgtgggtagagaaggtgttggacgaggtagtttgtttcgaggtttagttatttttgtttttttagttttttttttggtttttttgggatttatgaggttttaagataagtaggggtatagagtttttattttatagaggaggtttggagaaggatgattggtttaggattaagcgagttatttgatcgttaggttttggttttgaaatatttaggttttttagacgttatcgcggttaagtttttattttgtttttttttttgttttttatttattttttttttaggttttttaaatgtagtgaggttaggaaggacgtttgcgtttagattaagaatttagttattttaaagttttttaatttttattttcgtagagttatgacgttatggtaggtacgttagaggtcgaaggatgtaaaagtggttttttgttttcgatgatgtaattatttagcgatagtggcgggtaaatttttttcggggcgggggaggtgtgagttttacgaaggaggttgatattaacgtggttatcggcgtttttttacgtcgttaacgagttttcgggcgtgcgtgtttttggagggagttaattcgcggtcggcgtggggttcggtttggcggaggtgatgttggtatgtgcgtcgttatcgttttttttagtattgacgggtttgagggacgataagttgacgtttttttcgttattatttggtttaggagggacgttcggggagatcgtacgttattgttttgcgtcggaagattttatttttaggtttttttttttttatttttatttttttttcggtattataaaatttcgggatatgagttggaagaggtattatttgatttcggagatttttggagttaagaggcggcggaagcgagggtttgtggagtcggatttttttcggggtgagttaggtaattatggtaatttcgggggtggggtttcgttttcggtagtcgagagttttgttagaatcgcgttttcgttttagttttttgttcgtgagtcgatttatttgtttagggtcggcgcgcgcggttgttttagaatttatgtagttgttttcgcgaggtttgtttgaggacgcgttgtcgtttatcgtgttgaggagttaggtgtatagttttgtgtttgataggatcgtggtcgatcggtagttggtgaggggcgtcggtgcgatcgtcggaagttttttttttaatttttggaattttttgttatttagttatttcgttagtcgtttagtaagtattaggttttttaggcgagggtattgtgttaggtattggggtgttatagagattttgttaaaagtttcgtaggtagtatagggtattttaaattatggaggtagaagaacgaggtttttggggaaatcgagttatggggtatggttcgaatatatagcgttgggagtgtagttagacgttagattatgataggttttgtatattagtgttgtttttattttatattgaggcgatgggttggtagagaatattatagagagagggaatggtgtattggagatagtggatgaggtagggaggttagttaagaagatattgtatttgagaagtggtgaaggtttaaattaggttagtgtagtagggagggagaggagagtgaggaagagggaggagtttaggataatttagattttttagatgattgcgtggttggtggtattaggagtatatttagttgttggattatagataatgtgtttaattttatataagttgagttgatggtgtatgtggagtatttaaagataaaggtattagatagttggatatgagagttggagagaattttgggttagtgataatagaattataagttatggaggtgtgaatagtaagtggttaattttgtgatgtggtgagatttagtaggaagagtgggtagaggagtgatttttaatttttttgtaatttttagaaggtgataaaagttatggttatttttttttagaaaaatgtacgtttgttatatatatatagggtgtatgtgtagttaggggggaaatattttattaattttgcgaggttcgtggttaaggattttaggtttagagtggaagttaatagggttaaatttataatgttgggaaatattattatttaaggtagtgttattgaatatatgagttgagttattatgtttgtgttaaaattatatgggttgtttgttaaaaaaaatataggtttttgggatttatttaaggttaatgaattacgtttttttggggcgggatttgggattttatatttttgaattgttttaagtgttttttaagtgtgttttaaaatttgagatttattgatataaagggaaagtagaagaagaggaatttgtgatagaggtagagagggatttgtttgagttaagaggaatttagaggtcggcgcggtggtttatatttgtaattttagtattttgggaggtcgaggtgggtggattttttgagtttatgagtttgatattagtatgggtaatatgatataattttatttttataaaaaatataaaaattagttaggcgtggtggtacgcgtttatagagttattggggaggttgaggtgggaggattgtttgagttggggaggcggaggttgtagtgagttgagatagtatcgttgtattttattttgggtgatagagttagattttgttttaaaaaaaaaaaaaaaaaagtaatttaggaagaggtttattgtgaaagtaaagagatttttgagaaagtgaagtagttggtagtattagaatttgtgatttaagatagtggtttaagaagagggaagaggtaaagtaaaatataaattgaaatttaggttgagtgtggtggtttatgtttgtatttttattattttgggagattgaggtaggagtatagtttgaaattaaaagtttgagattagtttgggtaataaagtgagattttatttttattaaataattgagattttatttttattaaataaataaattaaaatataaaaatttttagttgggtatggtggtgtgtatttattgttttagttgtttgggaagttgaggtagaaggagtgtttgagtttaggaatttgaggttgtagtgagttatgattgtacgattgtattttaggttgggtgatagagggagattttgtttttaaaaaaatgaaaataataataaaaaaatttagaattgaaatttgtttattggatttagtaggtagaaggttaatagtgattttttaagaaaagaggaaagaaaaggaaggtagtttagtatttatttgaggtgagttagtttttttgattaggtttttcgtgaggaagtatgttagatggaattattttttaaggagtatttgttgattttaatgtattggtgttagtttttgtttttaaaaatttttaaaagttgtagaatgaaaatataaatatatataatttaaatgatgtttataaagtagatatttatttagttattttttaggttaaattatagaatatgattagtattttatatatatttttttttgattaaaatgtttttgattagaatgtttttgggaggtgattgttgtggttattgttgttttagttttttttttttttttttttttttgaggtggagtgtcgttttgttgtttaggttggagtgtagtggtgtgattttaatttattgtaatttttgttttttgggtttaagtaatttttttgttttattgttttgattagttgagattataggtacgcgttattatgtttagttaattttggtatttttagtagagatgggggttttattatgttggttataatggttttgattttttgatttcgtgatttgtttttttcggttttttaaagtgttgggattataggtatgatttatcgtattcggtttaattttgtatttttatagggatggggttttattttgttggttaggttggttttaaatttttgatttagatgatttgtttgtttcggttttttaaagtgttgttttttttttttttaattgtttttttgataattttattatttttttttttttttgaaaagttttttatgtttatttttttttatatagatacggtaattattcgattttttaattttttttttattttttttcgttttttagtttataaaattattattgttatcgtggttcgtttttaatgagttgttgggtatattttttagacggggtggtggtcgggtagaggggttttttattttttagtaggggcggtcgggtagaggcgttttttatttttcggatagggcggttggtcgggcggggggttgatttttttatttttttttcggacggggcggttggtcgggtagaggggttttttattttttagtaggggcggtcgggtagaggcgttttttatttttcggacgaggcggttggtcgggcggggggggttgattttattattttttttttagacggggcggttggtcgggtggggggttgattttttatttttttttcggacggggcggttggttgcgtggggggttgatttttttatttttttttcggatagggcggttggtcgggtagaggggttttttattttttagtaggggtggttgggtaggggcgttttttatttttcggacggggtggttggtcgggtagggggttgatttttttattttttttttggagggggcggttgtcgggcggagatgttttttattttttagacggggcggttgtcgggcggagggttttttttttttttagacggggaggttgggtagagattttttttattttttagacggggtcgcggtcgggtagaggcgttttttatattttagacggggcggcggggtaaaggcgttttttatattttagacgatgagcggtcgggtagagacgttttttattttttagatgggatggcggtcgggtagagacgttttttattttttagattgggtagttaggtagaggggttttttatattttagacgatgggcggttaggtagagacgttttttattttttagacggggtggcggtcgggtagaggttgtattttgggtattttgggaggttaaggtaggcggttgggaggtggaggttgtagtaagtcgagatttcgttattgtattttagtttgggtattattgagtattgagtgaattagatatcgtttgtaatcgcggtattttcggaggtcgaggttggtggattattcgcggttaggagttggagattagttcggttaatatagcgaaatttcgtttttattaataaaatacgaaaattagttaggcgtggcggcgcgcgtttgtaatcgtaggtattcggtaggttgaggtaggagagttaggtagggaggttgtagtgagttgagatggtagtagtatagtttagtttcggttcggtattagagggagatcgtggaaaggataattttattattatttgttttttggggtttgtttttattttttttttgagttttgtttttttatgcgtttagttatttttgaaaatgttttgggtagatttgtttagattaataaatgttttttatgttttaattatttttttttttttgagatagtgttttattttgttattaagttggagtgtagtggtatgattttggtttattgtaatttttgttttttgagtttaagtgatttttttgttttagttttttaagtagttggtattataggtatttgatattacgtttagttaatttttttttttttttttgagacggagtttcgttttgttatttaggttggagtttagtggtatgattttggtttattgtaagttttgttttttgggtttatttattttttcgttttagtttttcgagtagttgggattataggtgttcgttattatgtttggttaattgtttttttttttgtatttttagtagagatggggttttatcgtgttagttaggatggttttgattttcggatttcgtgatttattcgttttagtttgttaaagtgttgggattataggtatgagttatcgtatttggtttatttttgtatttttaatggagatcgggttttattatgttggttaggttggttttgaatttgaatttttgattttaagtgatttatttttagcgttttaaagtgttgggattataggtatgagttatcgtgttcggttttagttatttttatttttattttttgagttagagttttattttgttatttaggttggagcgtagtggtatgatttcggtttatagtaattttttgggtttaagtagtttttttgtgttagttttttgagtagttgggattataggtatatattattacgttcggttaatttttgtagttttagtagagacggggttttattatattggttaggttgatattgaatttttgattttaggtgatttatttacgttagttttttaaagtgtcgggattataggtttgagttatttcgttcggtttatttagatgttatattagtggtaatttttgttattttgtgagttttttagtgtttaaataattttttttaagagatggggttttattgtgttgtttagttgtaattatattttattgtagttttaaatttttgggttaagtgatttttttgttttagttttttaagtagttaggattataggtgtttgtttttacgtttggttgtttttatattttttgtagagatgtggcgggtgggggggttttattgtgttgtttagattggtttcgaatttttgtttttaattgattttgttattttagttttttaaaatgttgaattataggtatgagttattgtatttggttttaaataattttaaaataatatttttatttaggattttagttaatttttaataggtggattagtttttgttgtattttcgtaaatagaagttttggtttatttttatttgttttaaatattgaattttatatttttttttattttattttatttagaatttagattgttaatgttttgaagttatagtttgtattttaattattattttattttagtgtttggttttagaaattatattgattttttgatagattatatataaggtaggtggatgagaatgtgggtagttagttggaaaaggttgtttggttatttgtttgattatttttttatatagttttttttttattaagagaaaatgtttttatattggtaaataaaatttttttgtttgagagcgtttagagtatagtagagtattttattttgatacgtttttttttatttttttttttgtggagatagaaggagttttaagagtagggggagattagaatcgtttagttgggtttcgatttggatgtttatggaattatttttattgaggattataggattagagtatgtgattgtgtgcgttaggggtgttggggggagggtataggttgggggagatagggaagttgggaaatagaaataaaaataaaagaaagaatttttttgtttttatattttatggagagggtatagggttttggtaaatagtaatatgagggagagagataggagggaaagagggaggagtgagagggtaaagagggggggagaggagggggaggaggaggaaggaaggagggggaggaggagggggggaggaagagggggaggaggatgaagaggaggaggaagaagaagggtatgagaggtggaaagatttgagtaagaggtaagataggaagagaaatgttgttttgggggtggaggttggtagagagtgagggtggggatggattatgttttttatttttgtttgtaggtttttaaggtttgtgatggtcgatcgtatgttggggtagtgtagaaatttttagttttagtatttttagtttgtggggattttagtttttagtaggattaaatgatatagatttttggttttagggatttagaaattacgtgagatttgtggaattaattaaagttaggtatttggtgtttttttgtttttttttagttttatttagtttgtttttttgtttttttggtgaatttgttagaaaagttgttaaaaagttgatttttttttttaataaaatgatttaagtttgtatttttttttataagagaggaggtttattttatttgggttttagaaagagttttgaaatagaatttagtttttggtggtttattaaaagtatataggggtttggtaggaattgtaaaagtttgatgttaattatattgggattaagaggatagagaatggtaggagttgggatatttttaaatatttatattaaaataaaaaaaatttaaagttaaaaaataattgggtaggagttaaataaaaatttaattttgagaggttgtatttggtttaggttttttattttgtaatttatggaatatgtgaaagtatttgaaaaattatagtattgattttatatgggtagatatatttttagagagatgtggtgggagttatggcgtagtttgtttaggtagtggtaggagcgtagaagattttgattttttttttcggttttaagatcgaatgtgtgttaggatatgtggttagggaagagaagttatttaattgaattagtaatagtagtaggaaaagaaaaagtggagggagggtagtttaggtagggggtttggaataagtaattgtattaatagaggtagttggtgcgagtatagaattattttaggttgggattttgttatttagttttttttgtatggttgttcgtgtttttggagatttgtgtaaatattaatggatgaggaggagagatggtttttagagtttagtttttatttttgttggttttttattgtttttaggtatttggtgaatgttggagtttttatcgttcgagatgttgggagttggtggttagttgtgtttggagttgggagatttattaagtattttgttaaaggtattttatttgtagtttaagtttgtagttttttattttttggtggttttttaggtttttaggttttatttatttttttttttttttgtgttatttttttagggcgttaggttgtttttagtatggttcggaaggtaaagtatcgggaattgtttttattagagtttttgggtcggcgggcgtttgtcgtggtgcggtttggttttatttattatgtgtacgattttattggggtttagttagtggattggtgagtttttttttggtttttggtagattatggagtaatgatttaaagtgggatttttttttagtttatgtttagttttttagtgaaggttagtggtttttatttttttttggaattcgggagtatttttttttaagttttaagttttttttatagtttgagtttaggcgtttggttttagttttgttttttttttgtatagtatttttattattttaggaattttttttcgtttgttagagatatgaagattttgtttattattgtttagttttttagagtgggtcgggaggggattagaagagttgtatgatggtggttgagatagggttattttgggaaggtttgggagttaggatgagtgtcgggttttcgtgtgtgtaaaaggttagatgtgattgttgttgtttgtttggtttttgatttagtggtggggtttgagtaatgtttttttgtttttttatggaaagtggaattagaaatggtgttaaggttgtggttgttttttttcgtgtaaaatggtgttgttattattttgttttgaaataggaaggtgggatttttggggaggttggtgaaggagggtagggtttttttttttacgtgttatgttaaaattgttaaataaagtatttttgtttgtgatattttttggatgttttttatttattgtgacgtgtgtttgggtgttttgtttaggggtagaggtgaagtttgagttttgttttatttagagaggaaaggggttaggggtttattttgacgtttaggttattttttttgtggagtggtgagggtgtatttaattttttaaattacggaatttttgttagggtttaaaaaagtaaaagtttagtatagtttaatttgtgttggaatgaaagtaagagataagtgttttagaagtttgttattgttttgtgagggtttttaaatattttgtattcgtgggttatgttgggtttttgtacgtttaggtatatatgagtttgtgtgtatttatattttgatatagatatatttggtagggggaggtgtttaggtattggaatgagaggagttaacggggaaggatagggttatttttgggttaagatttagagttttttatggatatttaggtgttcggggtgtttttataattttgggtttgaggttagttgtattttttggttgttacgtggttttttagtttagttgggttgggggaggagtaaggtttagagttaattttgtttcgaggtttagtttggttagaaggtagtagatagatagacggatttaattttttttggattttttagttatgaggttgttttgggggttgatttgggtatttagtttttttattttatttttgtagaagtttaggttttggaggcgggatgttgggtgtttggattggggtagggttggtatcgggattcgatttaggagtgagggagagtaggggtggaggtgttagagcgaagtttgattgttgattttgtttgttttttttaggttgtttttgttttttttttttgtggtttatttgggggtttttttatcggtgggggtgtagttttaggatgtgtttcgaggataggtagtgaaaggattagtgtttttgagaaatttatttcgtaataatgttttttgttttttaaaggtggattttatttttagtttagaaagagatttcgtattttttagtttttaggtaattagattttatgtttttttgttgtttgtgggggttttttgttttgtttttatttgttttgtaagtgttattatttttttattggttttttttttttttgtttttttattttggtattttttttttacgttttttttttggtttttgttttttttggttagttgttttttgttttgtgattcgtttttttttttttttttttttttgataggtgtttttgaaagatgcgaagagttgtggtttttattaattttttagaggttttgaggtttagttggtggtttattcgttatggttaaaggattttttgtttagaacgataaatatttagggtattaatttgttttttttttttcgtcgggggtatttttttttgtagacggattagtttatttataattttggttagcggggtgagttttagttttagggttttaatttttaatttttttcgagtttttttaggatgagtttggtgttttttaagtgagataatttgaaagaaagtgttatatagaaggggtgtttaggaaatatttgttttttgttttttttgtggagtttgatttattttttttttgtatatggatttttgtttatttttttttttttttatttttagttcggtatcgggtttttgttttggattagaagatgcgttcgagtattgatattattatagttatggtggaggtgagttttcgatttttggtttttttgattttggttattgatgtgattttttgtttgtgagtatttttttttttgtagaatttttacggttttcgcgtgcggaagaaggaggtgtatatgttttcgtttattttttaggatgattttgtgattttagatattttagagtgagcgtttttaatgtgggggttgtttttaagttatattattttaatttttgttaggttttttattttttatatagaggtacgtttttagatgttttgatttttagttttttgagtttttggttaatttttatagttttttttttagggaagtaggttgttggtttttcgtgttttattgtatagatgggttgagttttttttttgtttatttttaggttagggatttggaagattttagttcgatttttagatggtttggaatttaatagtagtatttagtttgaggtgaagaaatatggtgagagttggaaattggagggataggtagttgtttttttgaaggaaataagggtggaaggagaggtattgggagtagtttagggtagggagatatgggtgttatagttttgagtagaggggagtttttgagttggagtttgatttgtttatttttttattttgggttagttttttttaattttgaggtgaagattatttttggaaagttttatattttgacggtgttaggttattttgatgaaatgtagttagatatttaggttaggtaatatttttttttttatttttgtttattagtatcgggttttgttttttatttagtatgaatgggtttttgtttttttgttttcgggttattattttttttagtttttggtttatttttttttttttgttacgataggtatatttatgggaagttagtgtagggggtggtatatgtgcgttttgggtttttagatgaggatggtaagaagattttttttcgggggttggagagttagattaaggtaggaaggagaataggggttggggaggggaaggggtaagggaggtgaggtgggagatttagttttattttatgttttgtttttttttatgttttagttggtgaatggatagagttatattttttttttaaaggtagagttttaggacgttttggagaagttgaatatgggtattattgatttttaggggttgcgtttttacgttgttgtagttattattgagtatttaggtgggtgatttttttttattgtaattttagatttttgtttttgatttttgagttaattttttgtttttcggtattaatattattttattttttatattttattttagatttaaaattaggaaatatttaggagatttggtttttttttaattttgtttttgtgattcggtttttttttttggttgagtttatttatttttttgttcgttttgtttatttttttatttttttagtggatatgtgttgtttaatgtttcgtgttaggttttagtatgtatagatatgttggggattagttttaacgttattcgtagggtttttgaagtttattggtgatataggaatgagaagagataggttaagagtttataaagagtgggggttagggggttaattgtaaaatggaggttgtaaaaggtttagagttttggtttttatattattttttgagtatagttatttagatttaagaagtagatgtttagggagaaatagtgaaagggaggtagtgggttataggcgtaatttatagtaatagagttttaaatgaattttttttgtgtttaaatagtatgtttttaaattatcggagagtagttggtggaagtgggtttagttaggagattgtatgtttgtttaatgttttaaaggagggtttttttttttgaatatagtgtttatagataagatagggggttttattttgagtatgggaatatgatggtaattaggaggtttttttttttagaggttttttgtggttttttataatttattgttttatatttttatggttagtttatataggtattttataagttttttttttaatatgtttttttttttttttttttttttaatcgttattgttattatggtttatttgtggtgtttggtttgtttttagaagtgttttttgtatttgtagattaaaagtaaatagtataaatagatatatattaaagtaaaatttgtaatagttgattatttaatggttttaatttgtttaagaggatttatgtttgaaagttcgttagtagttttaatgagaatgttagttttaggtaggagggttaaatgagtttgagatgttttaaaaatttgtttttttaaaatttggttatatttaatgttaaatttttattttttttttttagatgatgtttaattttttaaaaatgatgtttagtagtattatacgaatggggagttatgtagaaattggaagtattttaattatattgtatttttaattgatgttttaagtttattgtacgattttttatttaaataatagtttgtttaagattatttgtttgatttgttaattgttggtttatttgggtttgagaattttataattttgaggaattttttgttaattatttatatattttgtagtttgaatagaggagtgtaaagtaattttagtagtcgtagtagtagttgtgattgtaataaggtttataagattgttataagggtaaaaataaatttttttgttttggtaaatatttttttttaaaatatttttgtgataatatgaatggaaggagaggttttttaaggtttattgagggaaattagtatttaaattttttttttagtttttattagtaatatagatgtttttatatcgaacgtggaattaatataggtgaaaaggtgatagttttgataagtaatagtttgagaattaggtcgaatgttaatatttttgattattaatataaaaggagggttgatataattttgaatgggtattgttttgttggaagaaaattgatacgtaaattgaagtttttaattttttttttttaaagataatatatttttttttaaatttaaatatgagattgggttattattaatttttataatttggagtgtttagggtttattattggattaattattttgggatgtgggttagttgtattaaaattggtttaaattatgggaaaatgagtacgttttttagtgtaagtagtgttatttttttgatagtatagtttttgttttagttttgttttgtatttattattttgatgggtataattaattgtaaaggtttttttaggggattaattaatgataattttataggaattattttgtagtattatagtgtgattagagatgtaattttttttaattaatatttttaaattatttgattattgttaaggttgttggtattttttttttgggggtttaaattgttaattgaattgaattttgtgaatgattcgggttttatttagaaaataaatgataggatattggtttttgattatgatttggaattttaattagttaatgttgtcggtagttttttaggtaatcgatagttggttttatgtaaagaggggggaattgataatttatggatatatttattaattttttttttttttttttgggtgagagggtttatgagtatttgtaggtttagggatttaaacgttattattaatataaattttaattgggggttttaattatgtgataggtttaattaaaggtaggaatgggatatatgtttaataggtataattttgggttgttgtagttataggtttgttaggcgaggaggttattgtttttattttggttttgtattttaggattagtaaataatagaagataaatatgagtataattagtaatttttttttttagtaaaagagtgatttgtagtgttatttggtattttagtttattatatgttattaatgaggaattttattgggggtatgttaatttattttagttaagtagttatgttattagaagttgagaagggggtgtttgttaaagtaatagggtagaagaaaggcggatttaagatacgagtttaatatagtgtagtaggtataggtagtaggtaaagtgagagaattaaaaatgaataaattatttggtttagatttttgtttttttagtataatgtttgaggtttgtgttgtttgtggaagtcgtattgttgaggttgtagtttttgtagggttttttttaggttggtttaaatttttttttattttttaattttttattttttgatgaggatgtagtttttaggttggtattggaaattttaggagtggcgtttgtgttaagagattttttataatttttaaagagtaggttagtgttttaagaaaaatttgtgttttattttaatgtttagtttatagaaaattggatgatatttttttaattttagtaaatacgtttatatacggaattttttataattattattttaaaatttgtttagatttttaaaataaaattaaataattttttttgtataaattttttataattttttttatgatttttatagataatttttaatatgttttaattttttatgttttataatttttttattaaaggtatatttttataattttttaaatttttttattttttttgtatttttttgatttttgttttagttttttttttatttttatttttttaaatgtgtaataattagatgagtgttggtaataatggatatatgtatatattttagtttttaaaatttagggatgtgtttaatatttgtttgttagaattgattaggttttaattttttacggttaatatttattgaaggagggtatgtgtttgtgagttggtaatttgggtattgtgggataatttgtttagttagtttttgtgtaagttgaaattatttagataagtttttttaattttggtggaataatcgatgtgattgggtggtttggttaagtagtgatgttataatttgaaggtttgtttgattattgtcgtaagttaatgggttaggtagagagttgtgggttcgaatgtgtgtaataaaagtaggatgtgtattttggtttagtaattgttgaagttgaagaaaaagattatatagagtgggttttagagtaaatttaaggttgtaatagtttttaaataaatatatagaataattttagttttttgaatgttagtaaatttagattaagtgattggattatgtggtttttattagattgttgtttttttatgtttattagatttattagtaaaaatagttatggttttttttaaaggggtattataagtaatttttggaagaatttatgtagttaattttaagaattgaaaagtttttaggataatgattattaatatatttaataaattttgttaaattaatttgttatgtaattgagttaataaatgtttgtttaatttgatttttatttattggaattataatttttattgggtttagtgttataaagtttaataatttatatatgagtttgtttaattagaattgttatttgatttaagtatattgtaagtgtttttatggtattatgtggtaaaaaggattatttaattaaattattattttgaataataatttttattattgtgtggttagtgtgaagtagggaatataatgaattataaaggtaagtttgagttaattttattgatttgggtttgttgaattttgtttttaattattgataatttttttatggtttcgggtgttagttttttgttattgcgtaagttggtatttttttttaatattgagaagagattagatatagtataagtaggaattgttaaattgggttaaatttaattaatattttttaataatttttgaaaattatttaaggttttgaaagaattttttttaatttgaattttttgaggtttaatggttttattttgtatttgtatttttaaatattgaaaaggagtggttgtttgaattttgttaggtgttataagtaatttagtatttgtaattgttttttgtaaagattaataatattgaataagttggtttttattttttgttgtataaatttggaaattgatttttaataggttggatagttttgtttataaaagtttgataaattgtgggattatttaatatattttggggtaaaattttttaatgatatttggttgtaggttttttgttattaacggtaggaatggtaaaggtaaattttttgaaatttgtttttgttaaaggaattgtaaaaaagtagttttttaaatttataataataagcggttagtttttagggagtatagtgggggatgggagtttaggttgtaaggtttttatcggttgaattatagcgttgacgttatttatcggatttttttttaattataaatattggggaattttaaggagagaaagtgggtgaaatatattttttttttagtagtttattttataaagtatttttaatttttttttagggagcggttattgtttaatttagacggggcgtcgggttatttattttaagggaaattgtttttttattgtaataattgtagggtgaatttgaattgttttatttttataatgaattgtgggtcgggtaataatgggtacggtgagttaagtttcgggttttttttttttgtatttattcggttgaggaggaggtggttattttggatatttttttataggaatcgtgggttgaataattttttgagtaggtttagggagattggggagattggtataaattatttttagatttttttttttgttagtattcggtagaggtggtttagagttttgattattaaatttttttttttttttttttgatttagttttattatttgtttgaaaaggttttagtgttgtatgtattaatgattaaagcgattaaataggtaaaggaattttttttttttttttatatgtttttttaaggttttttttaatttttttttaatgttttaattttaaagttttttgttttgggaattaagggtaaaattgttttatagtatgaaataaatttataagatttttcgtattaatttttattttattatgtatgtttgaagagttgtcgtaggaagtttaaatacgtggtgtatttatttttagttttttttattgtgtttttagttttttttgggcgtttcgtttatttgtagaggttaaaatttttatgtttttgggagttttttgttcgttggttttttgttttatatgtttgagcgtttttttattagatttttttgggttttacgttgggcgttagaatgttggggattagttttaatattatttgtagggtatttgaagtttggtggtgataaaggaatgagaagagataggttaagagtttataaagagtggaggttagggggttaattgtaaaatggaggttgtaaaaggtttagagttttggtttttatattatttattgagtataataatttagatttaagaagtagatgtttagggtaaaatagtgaaagggtagtagtgcgttataggtataatttatagtagaagcgttttaaatgaattttttttgtgtttaaatagtatatttttaatttatcggagagtagttagtgggagtgggtttaattaggagtttgtacgtttgtttatattttaatgttttaaaggagggtttttttttttgaatatagtgtttatagataagagagagtaggtttcgttttgagtatggtaattaggaggtttttttttttagaggttttttgtggttttttataatttattgttttatatttttatggttagtttatataggtattttataagttttttttttaatatagataggaatacggtagtttgtgttttgggagtttattgttttgtgggagggaattatttaagttattttttatttgtttttttgtttttttttttttgggttttgttttttatttttttttgttttttgttttgtaggtggggagatggaggaggtagagtttatattttggtattttgtgttattttttttttttttggattttagtaagattaagcgatattttgtgtttggggttttttttttgttgtaggttttttttagaggggaaggatgagtagggaggatgtggtagttaggagggtttagggtttgattatttttttttgtttgtttttttttatttgtttaggttttggttcgtgagatgttaggttttttagtttttggtatttttgttaaagtttttgttacggtgtttttttttgggtttgtttttgaagtttaggatatttagtaaaatatagacgggagcggttaagttagtattttaataattattttttagattattttagagttgtagtttttagtaggatttttcggttttttgggagatggtgggggaaggggaggagggtgagttggggttttaaggatttatggtttgatttggggggaaggtggggtatttggttttgagttattattttattcgtatttgattttttttttaggtatttgtaggttttttatatttagcgatagttaggtttattgtggtagttttatttttaggaggtttcgggtttttgtttattgagcggtcggattttcgattttttcgtgttggggatattttgaatttgaatttgcgagtcgtgggtagtggggttatttttttttattattattatatggtgtgtatgagttggggagttaaggagggttggggtgtagggaagagttttttgggtggggttgggggggtttaaggttgaggttgttttatgaagaggtaattatttttgttttttttatttttggtttagattttatttcgagggtagatcgtgtttatgaatcgagagtttaagaggattttgatttcggtttcggtgtttgtggattattatttggtattttttttttattttgtggttttttattattatggagattatttagtggttaattttttgcgagtggatgtttaggttggggtttgcgagggtaaggtgatcggggttaggagagatggtatttgtgtcgagggggttgaggatagggtgattgttaatagggtatggatttagtttgggggtagtgaggatatcgggattgaaggaagtttttttattttgatcgtttttatttgtcgtttttgttagttggagtttagcgtggacggtgttaagtagtatcggaacggggagttcgtgaagttttatttagaaatcgattttttagttttggtggcgttgggagttttggatatagttttgtatgttgtaggtagtaagttttataagttttttaatatgggtaaggtttgtttagattttttttatagtttttttatttttttatggtttatttttttgtttttttgagttttgggcgtagtttttggattttattgaggttttttatagttttttttttatttggttttgtggtttttattttttggttttgtatttttttttatttttttatgtgttgtttttttatttgtgtcgagtgtttagttttgttttttagttatatttggtttttagtatttttgttttttttgtaggtttttgaagttatgaatagttatgatttcggttgtggttttgggggtggggatagtgttttttaggtgttttaggtagcgggtttggttttttttgatggagattagtggattttatttagaaagagtgagaatagagaaggaaggggagtgggtggcgggaagataaggaaggaggaagggtttgaggggattagttggaagagttcgggtaggaagggttgggtaggggaaggggaggaggggaggaggtcgagtgtttgacggttggattgtagtttttttttttattaggattaagttgttttaaggagaagataattcggaaaaagagaaacgtgaatttttaaaaggcgattaatgagaaatgtgagttgcgggtgtttaggtagtagtttgggttttttatttgggattcgggttgggggtttgtttttttgtttttcggttttttgttgaatttacgtgtggtatttggggttagagattcgaatttcgggattacgagtggaaggtgggtagttttttttagtagttttttttatgttgttggttttaaggggtcggggcgggggttgaggtgtatgttttttttgtttttttatgtttatttttatttggttttgtagtgggttagtatgttttttcgatagttaagcgttgttgttaggatggggtgatacgtttgtttatgatgcgtttttgcgagtagcgggtagttcgcgtgtagtagtcggattgtcgggagttttttttgttttgttgttaatttgttgagagtttgcgtaagaagagtagggataagggttaggcgggtttttaacgaggtgaggggttgggtggggttagggtataggtggcggcgtttggaaaggtagaacggttttttttttattttcgtttatcgtggttttttagttttggagattttgtaggaggaggatttgattgatgaggatgatattttcgtgcgtagtttttttttagagaattggttttggagagtggaaatagtggatcgtttttaaatgtgagagtgtgtgtcggttcggttttttttttgtgttgtgtttcggggttagtcggggtagacgggttttttttgtttttttttatatagattgatattgtggtttttcgattttttgattacgtgggagatttatggtttgagtttgtttaaaattaaaggtgatgttattttgtttgggttttaggtgatttcgtttttatttttttgtattttagttttttgttttttttgtttttagtgtaggaagagggtttagtgatttggggaggtttgtgttagcgtgtagttggcgtgggttagagggtagaggcggattgagatagagttgggttatttttattttttttttttgtggttttgaagttttgatggtttttttgatttttgtttttgtgtttacgtttttttttttttaggtttatgtgtggttattttagtttagtttcgggtgtttcgcgagttttatttgtattttcgtttgtttatgtttgttcgtcgttttgagtagttggagttgcggtttgttttttataattatttggataaaaatttgattgtgaggttttatgggagtttgagtatataggagttgggggagttagggtttagtgaggggtggggaggttaatcgggttaggattttggttattttcgtttttttgtttttaggtgagcgtttacgtgtttttagtggaggggttgtgtttggttgggggcggagggttggtttagtaggtgttggtgtttgcgggttttgttcggtttgttgttttttttgtggtgtttacggtagtcgtcgttgtgtttttgaaggtggtggttcgagggtttttcgaattttttgtgggagatgcggtgtttaaggttttgtagattgaggtgaatggagtatttttgaatataagttttcgggtttttagttttgttttttatttttagtattttttttgttggttaggttaggggtttaatattcgaattaatgttttggtttgtttttattttttataattttgatttaattttgtttttggagttgaaatttaaagttttgggggagtttgcgttagtagggtaggttgtagttttgtgtgattttataattatgttttttttgagatagaaggaaggggttatttatagagaggagttggtttatgaatttaattttttgggtgagtgattttttatttttagttattggttttttaagtgggtataggtggtgggggatgtggatagtaggataggttgttaattttttttatttttttagattatcgaggtcggattttggaaatatttggtaattttgattttaatatgatttttgatggggattttaatagttacgttagggttataggtgggagtgttttttagtttttttttagtggttattttcggatttatgtgggatttgtggatttttgtttggttttatttttcgtgagtttttgatatagagtttttagatttttatttttttttttttatgtagttttagatttattggatattttaggttttgagggggttttgttattaggaggcgtggttttttttttgaggttttttcgaggttgtggggagtaaattatgatttatttggtttcgatattggttgtttttcgttatttggataagatagagtagtggagtatattgtttttcgagattaaggattacgtcgtggatttgatttagaaaggttttgggtgtaagggtaagtaggaggggggttaggaaaggatagttattggaagatggatagtttaggaggttatagagggaaagaaagggggtttttgatgaggatggggagtatggttttgggtttaaatagtagaagggtgagtgttatttgagcggttattttttttttttaaggttatatgcggatttagtagtttcggaaggcggatggtttttatgcggtttggttgttacggggtagtagtatttggtgagtttgggagagtggttttagggttttgagggggttagggttggggtaggggtgggatagagttggtatgatgggagggtggataattaggtatttgggggcgtgggtataatgagaagtaagtttttatttttaattttttttttttgttttttaggtttatagtttttgtgttgaaggttttgagtttggtttaggagtaggtaggaggatcgtttgagaaattgtaggagatatttaattggtttttgttttagtagtaggttgacggttcgttttaggatttttttttagtgatatataggagtatgtaggtgcgggtatgttggggttggttcgagaagcgtttgtcggaggattttttttgtttttttttttttttgtttgatattttttttttttttattaggggggtttggtgggtaatgatgagattgtggtatttatagtttttgtgattatcgttttttattatgggttggtcgttttttaggatgagggtgtagagttattgaagtagagagtggtaagtttagtggcgtttttgttttttgttggtttttagttttttttttttttttttaggaatttaggggtttaggtttaagatttttttttcgtttttttttaggaagtttttattttaaaggtaagtttatttttgggggagaaagtaagtgttgggtttttgggtgtttacgtagttgttattacggtttatgttttgatattgattaaggtttttgcggatttgcggggtgttgtttataataattttatggtaatggtttaggagattggaggtgaggggtgaggcgtttttggtagtgagtttgaggtttaggggattttaggatttttgagtgtgtttagagggagaggttggatgaagatttagaggaggaatgaagttataagtaggggtgggttgggggagatttaggagagtttagtagggggtggttaagggttaggggattaggtttttttttttgtttttttgtttattcgtggtttttttttatttttagataatttgtattggggtttagttattggtttttagagtaatgtcgtgtcgtttatttcggtttttcgtaatttattcgattttatgttttaggttttagttttgtggattgaaattatagtttacgttttgttgtattttttgttttacgagggtaaagtagagatggtagattaggttgcggtttggtttattcgttagggtagtttttaagggggatttcgtagtatttaagtaggggtcgttttcgggttttggcgggggtgggtagtttttagattaagggtttgtttgagttttggtttaatttttttaggatacggtgattgttttggatgttttgtttgtttattggattgttttttatattattgaggagaggggttttaatgtgatttttagttttataggtcggaatgggtttaagttttacgcgttgtagttgaataatcgttagattcgcggtttggaggaggagttgtaggtgaattattttttggtgaattattttttcgtttgggtagttaggatatttgggtttcgtggttaggttagaagtcgtttttaattttttattcgtggaattttcgtagtatttttttttggggttttcgggggaagattgattttttggttgcgtgatttggagttttgagttttagtttttttatttgtagagtaatatatatagagtttattttatagggtcgttagaaggttgaagtgagataatttatgtgttggtataaattttgtggaaatgtgaggtggggagaggaggtggggttgttttgaggaaggagataagttattggagtcgtaaaaataggtttgtttgtgtttttttaatatcgtttttttttttttgttgttgaagttttttttgggtagtaagattaatgtgaaggtgggaggaaatagtaaaggaattttgaaggtgagggttagggaaggggtggggttaggtattggtggaggagagggtgtggagtgagaggtttgtgggtagaggtatatggttcggggaaggaggtagatattttagggttggtgtttcgtgttttcgttttgggtgtttttttttttgtttgttttcgtttgttttttttatttttgggtatttgttgttttttttattcgttttagtgttggtggtttcgaattttattttttagtttaggttttttttttgaattatgggttttattcgttttatttttatagtattttagacgaggtatgttttaaagtttttttttattttgtgttttttgtttggttggtgggagttttttttagttaggagtttagttattattttagaggtcgtgttagtggttttttttttaagtttgtttttatgtttttagtgattttttttttgtttttttgttgtttgtggtttttggtgttgtattttagattttgtgttgagacggttttttttttatttggaatttttttttattttttgttttttttgtttgatttattgtttatacggtagtgatattgattttttaaaagttttagttagattagttttggggaaaagttatttttcgttgtttacggtttagatggttgggtttttgtttattttttcggttagatagttttttttgtttatatagatttttttgttttttttgtttttttttgttttttggtttataggataagttttttttttttttttaagttttggttagaagttttttttgagttttttagtttagtttttttttagtatagtttggagtgttggtttttgggggtaggtttttgtttttttatttttttgtttcgtttgacgtttgtggcgaatgtggtgttattcgtgtgtgtggattgtgtagtgacggggaggaaaaggggttgaaggttttaaatttcgtagtttagggagatgtttttaggtatggtattagagaggtttgtggttttatatgttttacgttttttttttgttttttgttgagttaggtttttcgtatttataatgttttggatatgaagaatacgatttgttaggatttatagatagaagtgatagttaaaggttacgtcgagtatacgagtgagtgtgggggttgggaggttttggggttaggtaggggttggcgtagggagtcgggtggttattttagttttttttataatgtttttttgtgtagtggaagtaaacgaggattatgaggattatgagtacgatgagtttttagttaaggatgatttagatgtttttttgtagttcgtgatatttttgtagttgtttgagggtcggaggaatcgtcgtaggagggaggcgtttaaggtggtggaggagtaggagtttagggtgtattatatcgtgtgtatttggtgggcgtcgggagttgttttgggttaggggagggagggtaggatttaggttggggttgggtttttggagttcgcgtaggtagaatttggacgatagtttatacgtttttataggcggaacggtaaggtggggttgtttggtatggttatcgcggacgttatttttttgagtggattttacgttttgcgtgttgatttggagaaggtgtggttagttatttagggtaattttttttgttttaggtattgagttttgttatgtgtagggtttgtgattaattttttttttttatagttgatttttttttttgatcgttacgtgagttattttgagatcgaggggttttacgttttgttgtattttgattcggtgagtggggagagatgaggtaggaagggattcgatggtatcgggtttattgagtatgcgttaggaggttttttaggagatagttgtgttagcggttggtgtttttgagaatttgtgatgttattagagagaaggataagaatgtgagttcgtgagatatagtagagtaaggggtagatttgtaggcggtagggatcgatgttagttagtagggatttttagggtttgagagggagttttttttaatgttggttttatttagtttgaggggttgtttttgtttttttgttgaattttttattttttttttaatattaaagcgtatttttttttataaagtgatggtggttatagatgatagttgtatttgtttttttacgattttatttggttaaaatagttattaatttttttacggtttttaaaatatttttatttatttatttagtaaagatagggtttcgttttgttgtttaggttggttttgaattttcggttttaagcgattttttggtttaggttttttaaagtatcggatttataggttagagttattatgttcggtttttaaaaaaagttttggaatatttattgtaatttttgggagaaaatgtgagaaaggtgtggtggttgttattagttagttgtttgtaggttagggagatttttatttagtgtgtgtagaggggttagtttttattagttggggaagtttggttgatatatttgggttgaatataatagaaaatatagagttaataagattttcggatagggagttgacggtgtagtagtttagtttaggagggatattggtacggtatcgtgtggattgggttcgcgtgggtacgaggaggggttaggtttgggatttgagtcggggggttaggtaggatgatagaatttgtagttaggttgtggtaaataaaggaggatttagtggtatttatgataaagatgaggtcgcgaggagggcgagtgggtttgggggtaggtagagtgttttggagaatttataggttttgttataattttaatgtaaggatggagttgtaagtttagtttgggaattattagtttggattggtttggtggaagttagggagtggttgagatttttataggggagttttgaggaaggaagtttcgaaggagggaacgtaagaaatgattaggttagaattaagggtggtttagaagttaatttttagtttagggatagttttatagagaatacgtttatgatgtaagattttgttgagggtttggagtagtgaagattggggtaaggttattttttgggaagtgaagttattagagattttgcggagtagttttgagagttttttgagtaggaaggtaatagaatgtgaaggatattggagagaaggttaataggaagtaaataaaaataggttaaggaaatttagtatagggggttgtagggtttagggagtgggttttttattttttttttttacgtttggttaggtttttatttttcgggagtgcgtgggttttgaggttgtgtaggaagtgtcggtggggttggtgtagtcggttagcgtaattttgtacgattattataatttcggtgagtattgtaggatattttgaaatttaggagaattttggtataggtgtttttttatgggataatggatatcggggtagtgagggggtagagagttttggggttttttgggattgaggaggtagaatggaggggtttgtgttttaatttttttttgttttttagagcgtagatgttttgtgttttacggggtattaagtaagagtagatttttggttattttgtgttttgttgaagtttgttagtgtgttgagggtgagattgagggtttggggcggggtagtggaggcgggatggtcggggttttttttatattgtttgatgggttttttaattttagggaagtgttttcgttagcgtcgcgttttggagcggggtttgtaggacgaggatggttataggatgaagtttgtttgttattattttcgtgtggagtacggttagtttttttatcgaggttttggtttgattttttttcggggatcggttgttttggtttttttgggtgtagtttgttttttttataggttatgtacgtagtttgtttgttttgatattaattttttatttttttagttttaaagtaatttattttttttttttttttttatttttttttaggtttttaggttaaggtttttcgagaagatagtagagttgtttttcgtttttttgagattaagattatttaagttttgtattttagtatgaagtaaatcggagaggcgggtagggttggggggagatagggaggttgaggtgtggtcgaggatttgattatttggaagtgtgaaaatttttttgggttgttagaagttttgggtttggttataaatagggaggtagtggtatttttttatgggggtggcgaaggtggaatgagaggatttatatagagtttttagtttgggtttattttgtattttttttttttttttgattatttttgcgtacgttattttcgtagttaaggatgttaaggtcgttgttaattagatgcgtaattttttggttcgagttttttgtcgttttcgtttggaatttgggaaagaatatttgattatgggtttggatggggttatttatgatttcgagggatagtgagttatttggtttttttagttttttgttttttttatgtttcgttatttaggttttgttttttagaagttagatgtttgtgtttttcgtttttatttgttattttttcgagttttgttgattgtttttttgttttttgtagtttttagtatttgttggattcgaatagttggatcgaggagatgttttttgaacgtttgtgtcggagtattcgttagcgggtagtttgtgtttagtttaacgattttttttaggagtatggtatttaggggtgttaggtgtgagggttgtttttttattttcgttgggaggaatttgaatttgggaattatgaagttggaagtattgttgtgttcgtttttatgaatatagtttgggattagggtatattaaaggtttttggtagtaaagtgttagtgttggtagcgaagtgttagtgtgtgttgttagggttgagagtagtgtttttgttcgatgtagttttgggtaggttaggttgatataattttagattttttgagttttgatgatttttgggttgtttagttttgttagaattttttagatgattcgttaggagtttagtgttttataggattatttcgagtagaattgggatttaagagtttgtattttaaggattagagtttatgttaagattattttttagtttttaaggttttttattgttcggttgtcgttagttattacggttttagatagggtttgtgtttagttgatatttgtgatatagtttttttgttttatgagttgttgtttagttatattttttcgattttgttttcgtgttgttggcggttttgaggtttgtagattttagttgagtttcgggttgttgaaagtttgttgacgtttggttttgttattagtggaatgaggtgattttttcggagttgtgtaatttttaggttcggtagtgtttttttttagttattggttttaaataagttaaaagtttgattttggtgtgtttgtgaattttttgaggaagtcgttgtttttttggggttttttttttttatcggatttgtttaatttttttttatttagtggtatatttggggtttttagagatgatttcgcgtttgtttaaagaagtttggtgagattagttttcgtagaggttatgatagtttagtagtttgttatttagttattcgatagaaattcgggaattttttattttatgttatgttttgtgttaggtgttagagatatagttgtttattttagggtttatcgttggggagatagataagaggacgggtagtttttattttttgtgaaagatgtgatgttagggagtagtgtggttttgtggggtatttaattaagttaggggtattgttaggtagggatagggaaggttttttggagtaggtggtttttaagtggggttttgaagattgagaaggagttaggtaaagagtaggggtagatgagggtatttggggtagaaggagaatatataaaggtttagaggtcgggggtaggatagggtatttttggggatattgtatgtaattgattatattcggagtttggatttggaagtggtggaagagatggagatggtgagataagtagtaagtacgttagttttttaggtgcgttttttttcgatgagtattgttttattttacgtaattttgagaagtttgggttttttttattgtggtagaggttttttgaggtttttgtatatatggttttatggttgtttattagattttttttttagtagttgtttagtatggtggtggtataagtttatttttcggagttagggatttagttgtagtaagatatggttcggtttgggaggttaattatgaagaaggtagtagttgttattgtttaattttagaaattttaattttgtttttttttttttagttttgattatggatttagtagtagcgaattcgttaatgtagtgggtggtatagttagggttttgattttggttttgtagtagtatagtttggaaaagttttgaggggagagagatttttattggttcgagggtttggtatagagttagaaatgggggggaaggtatggggttgggtcgtttttgattttttaggtattatttaggaggttttggttttttattgaattttgttatttttttttggtatggtttttttttaaatttttaaattgtttttttatttataaaagtggtttttgagtgttagtttagtgggatttttattttttatggttttagttttttaaatagggttggatttttgattttgatttagttgtggttatttagtttttttttggggattttggattttgaggggggtatgtttagttgtgttgggaatttatattttttttggttggagtagaatttgtggattgtagttttgagggtagttatgttttgtttgtgtttggaaatataagaaatttgattgtagagagaagaaagaggagagaggaatagagcgaggaaatcgttcgttttcggggttttttttgttttttatttttgattttttaagattagtggggtttttttttttgttttttttttttgagttttgtgaaattttttaatttttattttttattttaaattagtttaaggtgggttgttttttttttaattaaagaaaggtgtttttggtggttaaaggtatatattcgatagttagatttttaggttggaattttgttttttataatatgcgaataatattcgtgttgtatatagagtatggttgtgaagagttgagtgagtgtttataaagtatttagagtagtgtttggtatatgttattatttcgtagcgggaaattatttttttttttgttttttgggtatttttgtgagtgaagggaggtattaataataattatattgggatatttgtatatattggaatgttttaggtaaattaggtttaaattgtattattttatttgtagtttaaattaataaataatttatataaattatattttgttttttaggcgatttaggaaggtttattaggtagggattgttattttttttttgagataaatattatgttagtaaattggtttacggtggggtggtagagggagagggtttaggtgggggcggatattattgtttgtatagttgatgtggaattagaaagttgattttggatgtaggaaaaaggttagggttgtattttttttttttgttttttgatgggtgattaatttttttgaaatacggacgttttaaggttaatgagattggtgttattttagaaaagggttattttgtgggcgggtcggtgggagggtatttgaaggtggggttaagggaggttttaaaatagtttatatagtaggagggatggttggggtttttgagttataagtggtattttagggttttgacgggcgtttcgttatgttgtttttgggtttgttgttgttgttgtttttgttggttggcgttcgtttgttgtggaattggtggaagtttcggagtttttatttttcgttttttgtttcgggttttttgtatttgttgtagttcgattttttaatttatttgtttggtttgatttagaaattcgggtttatttataggttttattttgggttgtaaggtgagaggttgatttcgttttggtttttattataggagggggcggaggtgacggagagggtttttttttcgttgacgttgttttggttgttttttagatgtggtggtgttgaattttaagaggattattgaggaagttatggttaaaaagtgggtagattttgttggtagatttgagttatttatttgtaagggttgggggtatttttttttttttaaaaaaatttttttttaagagatgggtttttgttatgttgtttaggttggttttaaatttttagttttaaatgatttttttattttagttttaagtgtgagttatttttggggtatttttaatttaggtttttggaagtttttgggggggtatatttggtggggagaaagtaggggttggggaggtcgaagaaggttaggtttttagttgtttttattagtttttattttttagtttttaattttttttgtagataagttggtgtttaggaattattcggatttgtttttgggagattattttttgttttggaaagtttataagaagtttattcgtttagttttgttgttgggtattcgtgattttatggagttagtggtggagtagttgatttaggagttttgtgaggtaaggttgggtttttgaggttatttcgggttagtttcgttttttatagtagttttcgttttgttcgttgtatagcggtttgttgaatttatattgtttttttatagcgtatgagagtttagttcggtatttttgtggttattgaggaggaattttttttttttatttgtagtattatttgttattttattttcggagataagattaaggtgttttatagttttttaggtttatttttagtttttttttgagtttttttttgttttgaattgaaagtattttttttttttttggtaggacgataatttaatgtttgtttattataaatgtatttaggaggtgttaaaaatttggagttattggtttatttaaattgtggacgtgatttttttttttagggtgaggatttggagtttagatatttttgggttgtaggggagaggttggggtggagggagaggtttttttttatagttgtatttttatgttttttgtcgtagtttttttttaatttaggttttcggaggttgaagtaggttatagagaagagggattatatcgtggagatgtagttgaggtagtataaggtggggattgtacgtggacggttttttttcggtttatagttagtgatgttatcggttttagtattgttatgaggcgggtttttttgtatattttagttatgggtttgttgttattttgtatttttttttttaggttagtcgtttagttcgttttttttattttttgtaggagagtttcgtggtaggttagtggagggatatgatggattatatgttttaaggggtggcgtagtcgagtatggaagagggttttggatagtttttggaagggtacgtgtatatggttgtagtggattttttgatcggtggtattgagattatagtaaatatttttttttgggtcgtggtttttttgttttattattttgaggtgcgttttggggataagtaaaaggtttttttttagtaatttggttagggcggtgggtatttttatttagttttgagtattgtgcggttggggttgtgtttgttttatcggtatttaggtttattgggttgttgagggagcggttggaggttgggtagttgtgggttgttggggtaggattttattcgattattttttagatttagtagcgattgtaggaggagttagattacgaattgggttttggtgtttttagttttcgggttttttataaggatcgtgtacggttgtttttgtttaatgttattatcgtcgaggtgttgcgtttgcggttcgttgtgtttttagttttgttttatcgtattatacggtttagtaggtgattttcgagggttggggatgagtgaggaaagttcgagtttagggaggttttggttagtttttaattttagttttttttagtattttcggttacgatatttttgagggtatagttattatttcgaatttttaaggcgtttatttggatgagacggtttgggagaggttatatgagttttggtttggtatgtggggggtcgggggtttgtcgtgaaaatgtggtggaggttggttttcgttgtcgttgaacgtttttttatttatttgtttattcgttcgtagatcgttttttggagttaggtaagaattttagagttttggttttcggttgcggtgttcgcgtgtgtttgggcgagtcgttggcgcgtttggagtttttcgtggtgttgattcgattgttgtaggtttttacgttgttgtttttcggggacgttttgttttttttgtagtttttgttttattgtagtgttatttttaagatgtagtttttttaagtgcggttgtagtttcgggggatgggggtttatagttcgggttagagttagtgatggggtaggatcgatgttagtcgggtattttagttttttttttattgtttttgtacgaatttttttttttttttttgtaaatatagtgttgcgagatcgttggtagagaaggttttttttagcggttgggtggtgaaggattttggtttttttttcggggcgattttttagtgttcggtagttatattggggtgcgagagaggtgggtagtagtttagttttttttcgttggggagcgaaagttttttggttttagttttattttcgtgaagggtatcgagaattcgaagtttttttagtggtattagtttattttttgggaaaggggttgttaagagagagttaaagtcggatgttttatttgttttttttattttttttaaggaggtagtttttagtatttaattaattttttcgtagagttttttttttgatttttcgttgtagaggattgaggtttaattttgagttggttttttttagttaataaattaattttagttttttttgcgaggttggtatgattgttttattttatttagttatttagttttttgtttgttatattgtggggttgaaatttaggtaggtcgagttttagttattttagttttgagtcgtttttttattttttatttgatggtttattgtgttttcgtagagttcgttgaggttggcgtagtggtagtttttgtattattaggtttttcggtaggagatagcgtaggagatgagtaagttgttggggtttcgattacgggtagagaagatattgtcgttgtggtagtttatggagttttttgggtagggtggaggaaggagttatgagggtttttttttttagttttatttttttagttttatagtttttgtttatttgcggtgtcgtggtagttttttaagtggaggcggtagtatttcgtagtcgagtttacgtggaaggagtcgtattgggcgaatatagtttcgtttttagttcgtaggtttacgcgtatggagtagttatttgtttgtgttaggttgtgtagggttttattgtttgggggtgggatacgtgtttttattagggttttggtgtttatagggtttttatttttattcgtagttttttagtttttgtgaggtattgatttagttagaattttttagagatgtttttaaaattatgggtatagtttttttagtttttttagaagtttgtttgtttatttatgcggcgttggaatatttgggaagtaagtgggggtattattagtttttggttttcggggtaatagattttgttttgtatagatttttgggttttttaatgttatttattagttagtcgtttttattagtttttatgtcgtaaaatacgtttaggggtcgttcgcggttgtcgttgaggaagatggtgttggttttggaggtatcggtttcgttttgtatttttttttcgtagtttttggggaaggggattcgtagtttatttgggagaggagagtaggggttagtttttttttaagttttaggttttggttgtttatttagttttcggtttcgggttcgtgcgtttaggtattcgtggtgaaagaggtggatacgggcggtaggaggttttggttttatatggtttggagtcgtgtattgtaggaggtggagggaaagaggttaaggagttggtgagatgtgattttttttgggagtaggattttttgtgggatagataagggggggttaggggagagggaggtggagatttttcgggagggttagaggtagtattttttggaattatttagggaggggagttgggttagtggggtcggggtatttggttttgtttattaggggtgtggaagttgagtaggtagtttgcgggtcggattgggggtttagtttaagtgagtagggcggtgcggggggttatttttttggtttttaagtttcgaggggtttttagttttaggagggaaagtaggaagaggagatggggatgaggtttaatttggttttttttattttttttttttgttttatatattttatagattttatttgtggtgaaggtgatgttggttggggaagtgaggttggggtttcgtaggttacgtattgtggcggtgtagttggtgtggaggataaggttatgtagggggtagtttatcgcgttgtttggggttttcgtttgtagaggcggggttgggagtgtagagaggggtattaaggtttgttttttttattttcggttagagtttagttttttttttgtaatttttattttgaataagttttttttagaggttttaggtttgtttatttttaggggttgtgatttggacgttataggtgtttataggattttgggggggtttttagtgtagtacggcgaatttttcggttaagtttagtgtacgtaattgtgtgggatcgttaggaattgggggaaggggaggggtttagaagggttttcgcggttttttttatttcgtgtttttttagattttattggtttttcgttcgtaatcggagtttttattattttttttttatttttttcgtttttttttaatttttatttatgtcgtttttttggtttttattttttgtttcgggttttagtttattttattcgtggtgaggaagtttgtgagaggtttattttttttaaagtttcggatcgagattacggttattttatagcgagcgtttgggattagtttttggagtttttgggttcgggtttggttatttatttgtatattttgaggtttttttgaaaatattggggatcgagggttatttagggaattttagggcggttggagggtgggtagagtgtaggggggagaggaaatgcgaggcgatgagtatatggtaaaggtattattttcgttcgttagttggtaggagattttgaagttgttcgttcgggatggtgggggtatttagttgattttggttgaggtttttttgattttattgaattggaggttacgggggttttttagaattgtagaggggttaaggaataatgacgtaggtaggggtagggaggtttttttttgcgagtttttttttcgtttttgttttagtataggtttattatttttttttttttagtttttaggaatggaagtcgttttgtagatttttttaggtttattattaattcgtttatttttatcgttggttgaggtattaggtttttttcgtgaagtataaagatttttattttggggtagagtgtgtgtgggtttttatttgggttgagggtgcgggcggttttttggatgttgtcggttttgtggggttttcgtagtttatatagtgttaggttgtatagagtttcggaacgtaggtttcggagtacggtcgagtgtcgtgttttcggtattattagttcgcgttgtagtagtggacgcggatgcggttttagagtgtttggtgatggaattttaaagcggagtaggaaggagtcgaaggttttcggtggggttttttagttgagttttagtgaattggtggttacgttagttatagatagttgggataggcggggttttgatttttttgaggtttgattagtaggagttagttttgtacggagtgggtgggggagaagggattggagatagaagtatattagtttggtgatttagagtacgttttttttatttttttttttgtttttgtttttttatttgtaattagggatttgtagttataggggggttttgtggggtagagttaaaggttattcgtatttagtttatttattttttttttttggtattcgttttacgttttttttttgcgattattttttttgagttttcgttttttttttttgagttttaggttagaggtcggagacgtttggtggtatttgtggtgtttttagttgagaggggttttaggcgtttttttttatggaggttatagaggaggaatttgtagggggtgttgggttttaggtttgagatgaggattttgttttggtcgtcgtttacgagtaaggtttggggttgttcgttcgtgtttttatattggattacgaaggaattaaaggggttttgggttacgttttacgagaggcgtatggagtttggggttgtgtcggttacggttagtatttttaggcggggttttttaggaggtttaggggtttttggggttaattttggggttggtgtgtttttttttggggttgcgtgggagaagtttaggggagaatttgagtgaggggcgttatggggtgttttatttttattttttaggtttggtttaaggttgaggtgggaagtttataggtttaggtttagttagataatgaagtcgttgtggtttcgtgatttttgcgagttttcgcgttgtttgagttaggtgttcgttttttttttttatatttcggtgttttgtcgagtttatttcgagatattataggttttggttttatttatgtcgggatatatttattgagtttgaggagtgtggtgtttttttttgagagaagttgagggtggaattggttggttgaggtgattggtaaattttattagtcgtgtcgtggttaggtttgtttgaggtgggtattagcgagttttggaagaggagtttgtattataaatgtagttattgttgttggtttttgtgttttcgtttattttgttttttagtgatgttttttttaagaaaatgtttttgatttatttacggtagggaggtttgtcgttatttggataaggttatttttcggggaggcgatagtagttttagcgagtaatgaggagtagtggtagtgacggggtagagtcggggttgggagattagagagttttttttagggtttttttttttcgtttggtttggtttttgttttggattttttgatggatgttgaagtttatagggttgtagatttttttttttttttggggataggttagggcgttttatttcggtttgtttatttttgtagttatttttgtttttagtttaaatgtataaggaaatttatataagttggtttgttatagttaggtatagtagttttatttgttatttttagggtagagatcgggtttaggcgtttttttttaaggagttcgtagagtagaaatttgtattttttgttaggttttaggttttttacggtgattgtgcgttggtttgcggttataggtattgttttgggttgttcgttcgtgtttttgtattggattacgaaggagttaaaggggttttgggttatcgtttaggataggcgtagagagttggaggtttttttagttacggttagtttttttaggtggggaggtagttttttttttaggggagttgtgtagagggaggagggaaagtttttagttatatgttgtttttgtttaagttttggtagtttttcggaggtgtgaggttttgggaaatggtttttttagtgtagttttagggatagttttttgaggagatatataggtttgttttcgttatgttttataggaatgagggagaatagttttttttttttttggaggttgttgtttaaatttttttttgtttcgttttttttttgttgtgatcgaggatgcgttaaatttattatagattatttttcgagggatgggtggttgggggtgtagagagggtttttgtttattttgatttttagtttttgagtaagaatgaggttagagttgagagagatttttcggaggtttttgggttgttacggagatattttaaatatcgagagttggtttgggtagtcggttaatgtacggtttttattattgttaggttgtgattttttttttgtttttttgtggttattagtttgaatattcgtgttttttgtttttttagttttatattgattttattgggtcggggtagttagggtggggtagggagaagataggggattagttgggagaatagagggtagagtagaggtttgttcgggtggggttggggtcgatgggtggggatttgtatttcgtttttatagtgagggtttgggaagagaattacggagttttagggatttaggtttagattggtcggttgttttgtttttttttgggtatagtgatttatggttttgggagtggggtgagggtcggtgatttattatattttttttttagggagttgagttataggtatagtgatattaggtttttttatcgtttttttatagttaagttttttttttttttttatttttcggtttcgagttagggaggagggaggaggatgggaattattattgagtttagcgttatttttagtattatgtaggtgaggatattgaggtttcggggatgaagcggtttgtttatggttattttggtaaaggttaggattggaattggaatatagatttgttggttttaaagttcgtgttttttttatttttttagtagttagcgaatgaaaggaagtaatgtatatgttttagaattgtgtttgatatatagagggatttattttcggagttaagatggttgtgttagggttgatagagggaattttacgggaaggttgtagggttagttttgagggttcggatgagaggtagttttggaaaaggtggaggttggattgggatttatttgtggtgttgttagtagagatggggtttagtcgttttttgtttgatagattatagagtaggaatttgtattttttattgggttttaggttttggattgtgatttttcgttggttggttgttatcggtattatttggagtcgattatttttatttttgtattggattacgaaggagtcgaattcgtttttagggatcgtttacgagaggtttacggagttaggggtcgtatttgttatagttagtttttttaggcggggagacggtttggtgtttggggttggaaaagatagtgaggtgtatggagagtgggatggaggtaaaggggttacggagttttttgggttgttatggttttgtgagtcggttttaggaacgggagggtgattgggttaggagtaggaataaaagaggagttagataagaaagtaagtgttttttggggtgtagggaaagtagggagagggatgagtgtgagtgggagaggagagtttagggtttgggtttttttggatttaataaattagtgggtgttgaggattggagtgtggggtatagaacgtgaaattttaataggtgttataagggggcgaaggttttggtcgcgggaggtttttagtttttatttatcggttttggtttttatagggattgggtcgtggcgttttttattttggagtttaaagagtaggaatttgtatttgcgggtcgggtttagtttcgagacggcgatcgttcggaggttttcgtttataggtattgtttggggttgtttttgcgcgtttttgtattgtattaggaaggagttaaaggggttttgggttatcgtttatgagaggtttattgagttcgaggttacggtcgttatcgttagtttttttaggcggggttttatcggtagtggtgtgggtaggggcgttgaaaagagtagagtaggtttatgggttaggaggtaggattttgcgtaagggaggtagtgtttttttaggattggagtgagtattttttagcggttttttttaaaacgtttgttttagaatttgtgttttgtattgttgtaagtagtttataaatagtggtgtatttaattttcgtataatatatgaagtgggtgttattattattattattttaattttgtaggaatttgaagtataaggttaggaaacgtttgtaaagtcgtataattattatattcgaaggtatatgtagatttgggtagttggatttgaagtattttttgagttattaaaatattttttaagggagtttgaagattaataaatgagtatacgagtaatatggaggttttagattataatgggagaaggaagttataataaatagggtatggattatttgtttatttgattttatatagtttttatgaatttaaggatgaggtaggattattagtaatatgggagaaaagatagaaatttagaggtttagttaaaagaggtgttaagatttaaaggagaaatataagggggttgtagaggtaaatttggggacgagggtttgtttttttatttattcgtgatgtttacggtggatattgggtttacgcgttgtttttcgtggaggtcgtatagatgtattttgtatttgcgttcgggttttaggttttttacggtgatttcgtttttttcgtttttgatacgtattatttggggttgttcgtttttgtttttgtattgtacggtgaaggagtcgaagcggttttgggggacggtttaggagaggtttagcgagttaggggaggattttgttattgttaatttttttaggagcggttttttaggggttttcggggttttagtgttgggttttgtggggttgggggtttttttttttgtagtggagaaggagggagagagagtgagggggatgtttttgggttttggggaaaaggagggagaagttaaggttatgattgggggatttgaggttattttagagaagtttatttttggggttgggtggttttgtttagttgatagttaatatacgtaataagttttagggttagttgtggggggatttggtatagttattagtatagtaaaatttttgatggtttttttttgtttagggggagttaggggttaattatataggaaggtttaaggggagttttagttttagttataagtagttttgtggtgttgattagatttttgttttattttttattagttattattaaagagtaagaggtggtttttttatagtttttattttggggtttttattatttatttattcgttattttaatggtagatatagggtttacgcgttggttatcgtggaagtcgtataggtttattttgtatttatggtttggttttaggtttgagatggtgatttcgttttcgtgtttcggtattcgtatcgttttgggttgtttatttttatttttgtattggattaggaagtggttaaattggttttcgggaattatttaggataggttgagggagtcgggggtggtatttgttacggttagtttttttaggcgaggtttgatggggggtttaggggttatggtaggtattgtttgggtggtttcggttttattttttggagttggatagatacgtgtggggatagtgaggattttgggtttttagtttagtatagaaaggatgtgttataaaatataaagtgtttaagaataggacgatgttgtttatagcgtttttagtatagttttttattttttttttttttgcggttttttttattttttattttgatttttttgttttcggtttttattttatttttattttttaatatttaggttatttttttttgtttttttagtatcgttttttttttgagtatagttttatttggtttttgtatttttattttttttgtattggggttttttcgttattttttgtttattgggtttttgtttttgttttgtaataagtttagtatatttttttcgaggttagagtttggggtgtgtttttggatttagttttttattagttgttagtagttttagagttatttttttttcgagtttttttggatatttttttttttaatttttagttttcgattttagtttgagttattgttattttttattagggttattaattgtttattggtttttttgtttttaggttttttgttattttatttttatttttagtttttatagatgagttttatataggtatagttgttggggttattttagtatagatttgggtaattatatttttatttttgggagattttaggttttttttgtttttatattttaggattatttatttattgtaaaggatattttatttaatttttagtattttttatatattatgttttttttagttttttggtttttgtattatttgtgttgatttgatacgttttattttttttttaaagttgttattaagttaaggtttgtttggttttagattttgattgttttttgagtatttataggtagggtggtttaggtatttttgtttggttttgggttttttgttatatgtttattcgtttttgtttttttattggtttatagtttgttttttatgacgttagttttattaggataggaattttttttattaggataggaattttaattttgagtttaatttttgtgaggatttatgaatgtaagaaaaattcgttttaataaattttaagagagtttttaaatttgttattgggaggagttttgttataaaggtgttttgtgatttgtatataaatatttatagtagtattatttttgatagttaagaggtggaagtaatttagatgtttattaatggatgaaaggatgagtaaagtgtggtttgtatgtgtaaaacgaaatattatttagtttgaaaaggaaggaagttttggttaggtgtagtggtttttgtttataattttagtattttgggaggttaaggtgggagattcgtttgaggttaggagtttgagattagtttgggtaatatatcgagatttttattgttatagaaaataaaataaaaaggaaattttgattgatgttacgatatagatgaattttaaagatattgtatttaatgaaatgaattatttaaaaaagataaatattgtatgattgtatttatatgaggtatttagagttaaatttatagagatagagagtagaatggtgttgttaggggttggggtaaggggagaatgggagttcgtgtttagtgggtaggaagttttagtgtgggaagaggagttttggaagtggagggtgatagtttatagtaatgtgagtggattttatgttggattgtaaattagaaagcgattagaatggcgaattatgttaagtgtattttattataataaaaaataataaaaaaagtgtgttttttggattagtggtattaagatagatgagaattttgttagaaatggatggtcggttgggcgtcgtggtttacgtttatgattttagtattttgggaggtcgaggagggtagattacgaggttaggagattgagattattttggttaatacggtgaaatttatttttattaaaaatatgaaaaaattagttgggcgtggtggcgtacgtttgtagttttagttatttaggaggttgaggtaggagaattatttgaatttaggaggcggaggttttagtgagtcgagattgagttattgtattttagtttgggtgataaagcgagattttattttaaaaaaaaaaaaaagaaagaaagaaaaagaaagaaatgtatggttttttgttttaggttaagtttgttgaatttaaatttgttttttaataaaaatttttaggtatttggatatataaaggaaggaatattttttagagtatgtttttacgaagattggagagatagtagtgttttttagggttattttttttatttcgttttatttatatttatttatttgttatatttatagcggatattgggtttacgcgttgtttttcgtggaggtcgtataggtgtattttgtatttgtattcgggttttaggttttttacggtgatttcgtttttttcgtttttgatacgtattatttggggtcgttcgtttttgtttttgtattgtatagtgaaggagtcgaagcggttttgggggatggtttaggagaggtttagcgagttaggggaggattttgttattgttagtttttttaggagcggttttttagggggtttcggggttttcgtgttgggttttgtgggggcgggagtttttttttttgtagttgagaagaggggatagagaaggtgaggtagtttttttgggggatgtttttgggttttgtgaggaaggagagcgaagttgtggttatgagtgggggttttggggttagtttggagaggtttatttttggagttgggtggttttgtttagtttatagttaatatatatgataagttttgaggttagtgttggggaatttgggatagttattaatagagtttatagggtttttttttatttaggaagatttgttagtttttagggaagtggggaaagataaaaaagtattatggtttagttaagagtagaggggttttttgggttagtttatttattattagagaaagggagatttttttataggttttattttggggtttttatcgtatatttatttgttattttaatgatagagatggggtttacgcgttggttatcgtggaagtcgtataggtttattttgtatttgtggtttggttttaggtttgagatggtgatttcgttttcgtgtttcggtattcgtattattttgggttgtttatttttatttttgtattggattaggaagtggttaaattggttttcggggattatttaggataggttgagggagttaggggtggtatttgttacggttagtttttcgaggcgaggtttgttggggggtttaggggttgtggtgggtattgtttgggtggtttttgttttattttttggagttggatagatacgtgtggggagagtgaggtttttgggtttttagtttagtatagaaaggatgtgttataaaatataaagtgtttaagagtaggacgatgttgtttatagcgtttttagtatagttttttattttttttttttttgcggttttttttattttttattttgatttttttgtttttagtttttattttatttttattttttaatatttaggttatttttttttgtttttttagtatcgttttttttttgagtatagttttattcggtttttgtatttttagtttttttgtattggtgttttttcgttattttttgtttattgggtttttgtttttgtttcgtaataagtttagtatatttttttcgaggttagagtttggggtgtgtttttggatttagttttttattagttgttagtagttttagagtatttttttttcgagtttttttggatattttttttttttatttttagtttttaattttagtttgagttattgttattttttattagggttattaattgtttattggtttttttgtttttaggttttttgttattttatttttatttttagtttttacggatgaattttatataggtatagttgttggggttattttagtatagatttgggtaattatatttttatttttgggagattttaggtttggtgagtggtttttttttttgtttttatattttaggatgatttattaattgtaaaggatattttatttaatttttagtgttttttatatattatgttttttttagttttttggtttttgtattagttgtgatgatttgatatgttttattttttttttaaagttgttattaagttaaggtttgtttggttttaggttttggttgttttttgggtatttgtgggtagagtgattttattgtttttttttaattttggtttggtttttgggttttatatgtttatttttttttgtttatttttcggttttttgtttgtgtttataattgtgagttttatgaaaatatgaatttgtgtgtgttattttttagttttcgtttatgaaagaaaaaggtagttttgatattcgtgagttgttttttttttttgttaggttacggttgtttggggttggtttggtatagtttggttttggcgtggtttagttgaatagataattttatggaatattaatattagattaggttatttgttagtaggatggattaagataagaataaggttagtttgtgattatgttttagtaaggatgaattttaatattttttaaagtataaaaataattaaatattatttatttagttaatttgagtgatagttgtttttttattaatggtagttttggttttgttttagttgatttttttaaagataagatttagtgagacgttcggtaatagggttattttttttttttgatagcgtttaataaagagtaaaattttgtttttttaaatgtttttttaaaatattaaatataagtttagttttttaataatttttttttaaagtttttttttaagttattttatagtttttttgtattgtatggagtataattttatttatttaattttaggtgagtttttggaggtcgttggttagaggatattgatattttaaaattatagtgttcggattagggtaaggaattttttgttgaatgaataaattggtttattggtgagaaaggtttgtttttatttttattttaatagtgggtttttagagtgtgtagtcgacgcgttgttttttattgttttttgtttttttttacggtttttagttaattttatagagaaagtatattattaggaattagggacgtagaaaaattttttttaatagattttaaaagagggtttaatttttttgtcgtgaagaattttgttatttaaggggcgtgattatgggttagtagtattcgtattattttttgttggaaatgtagaatttttggttttagtttaaatttgttgaattttaatttgttttttagtaagatttttaagtatggaaacgtgtaaaagaagttcggttggtgagaatatttttgtttttatgaagttgtagagaaagtaatattttttagggttattttttttatttataaatatttatttgttatatttacggtggatatcgggtttatacgtcgtttttcgtggaggtcgtataggtgtattttgtatttgcgttcgggttttaggttttttacggtgatttcgtttttttcgtttttgatacgtattatttggggtcgttcgtttttgtttttgtattgtacggtgaaggagtcgaagtggttttgggggatggtttaggagaggtttagcgagttaggggaggattttgttattgttagtttttttaggagcggttttttagggggttttcgggttttagtgttgagtttcgtggggttgggggtttttttttttgtagttgagaaaaggagatatagagaggatgttaggtgtttgggggatgtgtttaggtttttaagggaaggagggagaaattatggttattattgggtatgtgaggttattttagaaaagtttatttttggggttgggtggttttgtttaattgatagttaatatatatgataagttttagggttagttgtgggggatttgggatagttattagtatagtagaatttttgatggtttttttttgtttaggaggagttaggggttagttttagaggaaggtttaaggggagttttagttataagtaggtttgtggtgttgatcggatttttggtttattttttattagttattattaaagagtaagagggtgatttttttacggtttttattttggggttgttattatttatttattcgttattttaatgatagagatggggtttacgcgttggttatcgtggaagtcgtataggtttattttgtatttatggtttggttttaggtttgagatggtgatttcgttttcgtgtttcggtattcgtatcgttttgggttgtttatttttatttttgtattggattaggaagtggttaaattggttttcgggaatcgtttaggataggttgagggagttaggggtggtatttgttatggttagtttttttaggcgaggtttgatggggggtttaggggttatggtaggtattgtttgggtggtttcggttttattttttggagttggatagatacgtgtggggatagtgaggtttttggttttttagtttagtatagaaaggatgtgttataaaatataaagtgtttaagagtaggacgatgttgtttatagtttttttagtatagttttttattttttttttttttgtggttttttttattttttattttgatttttttgtttttagtttttattttatttttattttttaatatttaggttatttttttttgtttttttagtatcgttttttttttgagtatagttttattcggtttttgtatttttggttttttagtattggggttttttcgttattttttgtttattgggtttttgtttttgtttcgtaataagtttagtatatttttttcgaggttagagtttggggtgtgtttttggatttagttttttattagttgttagtagttttagagtatttttattttgaatttttttggatatttttttattttatttttagttttcgattttagtttgagttattgttattttttattagggttattaattgtttattggtttcgttgtttttaggttttttgttattttatttttatttttagtttttacggatgagttttatataggtatagttgttggggttattttagtatagatttgggtaattatatttttatttttgggagattttaggtttggtgagtggtttttttttttgtttttatattttaggatgagatatttatcgtaaaggatattttatttaatttttagtgttttttacgtgttatgttttttttagttttttggtttttgtattagttgtgattatttgatatattttattttttttttaaagttgttattaagttaaggtatgtttggttttaggttttggttgttttttgggtatttatgggtagggtgatttaggcgtttttgtttggttttgatttgagttttgggtttttttattatatgtttattcgtttttgttttatttgttggattgtagtttgtttttttatgatatgtttttttataatgttgttatattttttttattgtgagttttattaagatagaaatatgtataggaaaatggtagagaagggtatattttttagggttgttttttaattttgttttatttatatttatttatttgtgacgtttacggtagatatcgggtttaggcgtcgtttttcgtggaggtcgtataggtgtattttgtatttgcgtttaggttttaggttttttatagtgattttgtttttttggtttttaatacgtatcgtttggggtcgttcgtttttgtttttgtattgtacggtgaaggagttaaagcggttttgggggacggtttaggaaaggtttagcgagttaggggaggattttgttattgttagtttttttaggagaggtttttcggggggttttggggtttttgtgtttggttttgtagggttgggggtttcgtttatatttttttgtggggttgaaaggtaatatagggggatatagagtttaagggtttaagggtaatttgttttgttggtgttgttaatagaggttatatattaaatgcgtttttttagagtaggttgagggttggggtagttttgtgttcgtcgtttagtgatttttggaataagagtcggtgaggtattttcgagttttcggtttgtattgttggtagagttgtattgttagaaatttttagaaggtaattgagatatagtgttaggagttaaagtaatttttattttttttgatttaataattttagttttgggtatttgttttaagaaaattattaaagtaggaaaaagttatagtatggaagaatttacgatggggttatttatgatagtagatgtgttaggaatataaatgattcgtagaagatgattaattttgttatagtgtttttatcgtaacgtattaaataattattgaaacgatgatgaatgttggttgtgtagtcgtgaggtgaatgattataatgtatttgtgtataaaaaaggaagtgttaagaattttatgaatattgattgtaattttaaaatacgttttgtatgtaaaatataggaagggaatgtgtattatatatattgttattaatgtcggtagttgggggagaaagtaggattatgagatttttgttttttgttttttaagttttttatataatgttgttgtattatttttattagaaaaacgtgggttaaaaaagaaattttgggttgggagtagtggtttacgtttgtaattttagtattttgggaggtcgaggcgggtggattatttgaggttgggaattcgagtttagtttggttaatattatgaaattcggtttttattgaaaatataaaaattagttaggcgtggtggtatgtatttgtaattttagttatttaggaggttgaggtaggataattatttgaatttgggaggtagaggttgtagtgagttgagattatattattgtattttagtttgggtaatagagtgagatttagttttaaaaaaaaaaaaaaaaaagaaaaagaaagaaagaaattttgggttataataattaataatagagtgtggggtgggggtggggtagtaatatatatagaataggaggggtaggggtgggttttttagtttgttttttgttagttttgtggttttttatagtggagataggaatataaaattgaacgtggattaggatagtttattttcggaatgtgaatttttttaatgtttattttttaataatttttttattttttttgttttttaatatttagatggttttttgaatatgtatatggaaatgaggttttttttttaggaatcggggatgtcgattgagagtgttttttttgtttggatggtttttgggagatgagttcgtattttatttggtgttatagaggtggcgatttgttttgtaagagatcgttttttagtagggttgatttttttttatcggtaggaattttcgaaaaatattttaagttaggtataataatttggttgaggatgatttagaaaaggtagtttgattgagtatttggaatttaattaattttatgatttttatttttttaattttttatggattagaaattttgaatttttttataattagaaatgaaataagtttggttgggcgcggtggtttatgtttgtaattttagtattttgggaggtcgaggcgggtagattatttgaggttaggagtttgagtagtttgattaatatggagaaattttttttttattaaaaatataaaattagttagatgtggtggcgtatgtttgtaattttagttattcgggaggttgaggtaggagaatcgtttgaatttaggaggtagaggttgtagtgagtcgagattatgttattgtattttagtttgggcgataagagcgaaattttattttaaaaaaaaaaaagaaggaaataaatgaaataagttataagagcgatagaggagtaggatagatggagtgtaaagaaggagaagatattatatatttttttttttttttttttttgattgtaaaagaaatgtttgttatttaagaaaatttggattatgtagaatagaataatatagaaaaaaatgtgttggaatattttattttatttaataaattaggtaattcgtgggatgtgtttttttttagtttttttgttatgtttgttatttttaaatggttgtgattagtatttttataaaaatttgggtttttttttttttttttttgagattgagtttggttgtatttgttaggttggagtgtagtggtgatttcggtttattgtaatttttgtttttcgggtttaagtaattttcgtgtttttattttttaagtaattgggattataggtatgtgttattatgtttggttaatttttgtatttttagtagagatggggttttattatgttggttagattggtttggaatttttgattttaggcgattagttcgtttcggttttttaaagtgttgggattataggcgtaagttattgtgtttagtttaggttttttttttttaatgtaatattataaagtaagggttttatgttaaaatattttagtggcggtataatagttttttttatagatgttgtttaaattatttagttattttaacgtggtttgacgttggattgttttttttgtgtgtatttgtgtatgtggttataataaagaatgttgttattaagatggaaagaaaggaaaattttcgtaagttaggtttggtgtgcgtttgatatattttatttttggaggttattagtggttgattattagagggaggttacgttaaagtgaataagtaaatcgttagtataggttatagttatagggtatagagggagggtaggatataggagataagtttggatttatagggtttggtgaaagggtatagtagtaaattaggtatttatgagggaaaggtggttatttcgagattttaagtattatttattagttacgtttacggtggatatcgggtttacgcgtcgtttttcgtggaggttatataggtgtattttgtatttgcgtttaggttttaggttttttacggtgatttcgtttttttcgtttttaatacgtattatttggggtcgttcgtttttgtttttgtattgtacggtgaaggagtcgaagcggttttgggggacggtttaggagaggtttagcgagttaggggaggattttgttattgttagtttttttaggagcggttttttagggggtttcggggtttttatgttgggttttgtggggttgggggtttttttttttgtagttgagaaaaagggatatagagaggatggtagggtttttgggggatgtgtttacgtcgtggggaaaaggagggagaaggttatgattaggggatatatgaaatagttaaggttatgattaggggatttgaggttagtttagagaggtttatttttggggttttgtttagttgatagttaatatatatgataaattttagggttagttgtgggggatttggtatagttattagtatagtaaaatttttaatggtttttttttgtttagggggagttaggggttaattatataaaaaggtataatgggagttttagttttagttataagtaggtttgtggtgttgattagattcgttttattttttattagttattattaaagagtaagagggtgatttttttatggtttttattttggggtttttatcgtttatttatttgttatttcgatggtagatacggggtttatacgttggttatcgtggaagtcgtataggtttattttgtatttgttgtttggttttaggtcggagatggtgattttgtttttatgttttggtattcgtgttgttttgggttgtttatttttatttttgtattggattaggaagtggttaaattgtttttcgggaatcgtttaggataggttgagggagttaggggtcgtatttgttacggttagtttttttaggcgaggtttgatggggggtttaggggtgggaggttttgtcgaggttggggttatttttttatttttttttggggttgtattagaaaatagaatgggtgggtatgtttggtgggtttttttttaattaagggattttgggatttttttagatatattaagggtttatagtttggatgttggtgttttaagtttagaatattatttttttgttttgaatgtttagttaatattatatttgtggtgaagttatgatgtttaggtggtatttttgtgatgtttagtgtgtaggtttgggatttttaggagttgttaagtaaatttgttttgtaggatagaattgatgttttataagaatattaattagggtcgggtgtggtggtttaggtttgtaattttagtattttgggaggtcgaggcgggcggattatgaggttaggagattgagattattttggttaatattgtgaaatttcgtttttattaaaaatataaaaaattagttaggcgtgttggcgggtatttgtagttttagttatttaggaggttgaggtaggagaatggtatgaatttaggaggcggagtttgcggtgagttaagattacgttattgtattttattttgggagatagcgagatttttttttaagaaaaaaataaataaataaaaataaataaataaataaaaaatagtaattagggttaggcgtggtggtttaggtttgtaattttagtattttgggaggtcgaggcgggaggattatttgaggttaggagtttgagattagtttggttaatatggcgaaattttgtttgtattaaaaatataaaaattagttagatgtgttggtgtatgtttgtaattttagttattcggaaggttgaggtaggagaattgtttggatttgggaggtagaggttgtaatgagttgagatcgtattacggtattttagtttgagagtttgggtgatagagtgagattttattttaatataaagaaaaaaaaaaaaagaaaataaagaatattaattaaatataataggtaagttgtattaggaggtttatttatttgggtttggaaattttatttaattttgagtatttttagaaattaatttagattttatagttgagggtagagagatgagattatatgagggtatttttgtagttgagttgtttttggatttgtagtagttttgttaatttacggtagagagagtatttttagtgatgttagtttttttggttcgtgtgaaattaattgttttgtttttattgatttttttaattttttttgttttttatagggttttattttgttttgatagtggtattataaatttattatattttatttgtttgttttttttgagaattgagttttaagtatttagggggtaatagttataaaagagtttataaaagtattaaagagtcgagttatagggtaatgaaaggaaaatgttttattaagttgtgtatatggttaatatttataattaaagtaatagtatttatgttaataggatttagtgttgttttaaaaataaatgggtattaatttgggagtttagagaatatatataattttttttattgaaattagtgataattatgagaatttgttttaagcggtttttaggaattatttattttttttagaagggaaagattgtagttattttttattgtgtgtgagagttaagttatattttcgtttattttttacgataggtatggttattttttttttatagatgaggaaaaggatgtatagagaggtcgtgtgtttgttttttgtttgtttgttttgtttttttgagatagggttttattttgttatataggttggagtgtagtggttcgatttcggtttattgtaattttcgttttttgggtttaagcgattttttcgttttagtttttcgagtagttgggattataggtatgtgttattatatttagttaatttttgtatttttagtagagatgggggttttatgatgttggttaggttggtttcgaatttttgattttaagtgatttgtttttttcggttttttaaagtgttgggattataggtatgagttatcgtgtttagataggttgtgtgagttttttgaggatatatagtttaaatgggttgaagttatggttaattttaggtgtgttttagtttgtgttatttttttggttttttatttttttgggaatttaaaaagtttatgtgtaacgggtagaagatttggggtaatattaaagtttcggagtgaaggtattagtagaattatttttaggagtttgggaggtttggttttagggaaagtaaaataaagttattagatattgataataaaagggaaattgagtttagtttagggtagggtttagtgttttattgtatatttattagttaaattaatagtagatacggggtttacgcgttggttatcgtggaagtcgtataggtttattttgtatttgtggtttggttttaggttcgagatggtgattttattttcgtgtttcggtattcgtatcgttttgggttgttcgtttttatttttaaattggattaagaaatggttaaattggttttcggggattgtttaggagaggttgagggagtcggaggtgatgttttttattgttatttgttttaggcgtagttttgtaagaggagtattaggggattttttttcgggggttaggaagagatagaaatagaatttttttttttgttgtaaggaggtgttgaggttttagttgttttgaatttaggttagaaggtgggtttagtttggttttaatttaagatcgatttttgattataattataattagattttgtggtttttttatggttttttaattatgttaggtagttttttattttagtatttttataatgattgttttttttatttaaatgttttttttttagatatttttatggtttatttttatattttttttaagtttttgtttaaaagttatttttttttgtgggttttttttgattattttatttaaaattttagtttttttaattgtaatgtattttttttttatagatttgattttagtaataaattgggaaataataattatgagatattcgggagattgtagtattatttggatatttgatattaaggtatgattgtttatttattaaggtatgttaattgtattgtggaattttattatttatttatttattttttgatatagagttttattttgttatttaggttggagtgtagtggcgcgattttggtttattgtaatttttattttttgggtgtaagtaattttttgtgttttaattttcgttaagtagttgggattataggtacgtgttattacgtttcgtttttttgtattttttaaaatttattattattattattatttttagtagagacggggttttattatgttggttaggttggttttgaattttttattttaagtgatttatttgttttggttttttaaagtgttgggattataagcgtgaattattttatttggttatattgtggattttttaaaaataatttttttaaaaagagatatatttttaaatatttagtgatgaaagtataggatgtttgtggttcgtttttaaaatattgtagtagtataattatataatgtaatattgtttggtaataaaaagtagtgtagtggttgagagagagtaggtggtttatgtttgttattttagtattttgtaaggtttaggtaggaggattttttgaagttaggagtttgatattagtttgggtaatattgtgagattttatttttataaaaaatttttttaaattagttgagtgtggtggcgagtatttgtggttttagttatttggggggttgagatgggaggatggtttgagtttaggagtttggggttgtagtgagttatgattatgttattgtattatagtttgggtaatagagtgggaatttgttttaaaaaaaattaattaattaattaattaattaattaatagtaatgtagtaagtatagtatttttatatgttatattgatgaattttaaaaatattatgtttagtgaaagaagttagatataaaagaatatatattgtttgagtttatttatacgaaatgttttggaatagtaatttatagagaaaaaagtagattagttataaattagggttgaggtaggaatgggtttggatttaagattttttttgggggtgatggaaaagttttaaaattagatcgtggtgatggttgtataagtaggtaaagatattaaaattagtaagttgtatattaaaaataagtgtattttatgttatatgaattatatttttataaaggtgttaataaagaaaatatttaggtcgggtgtggcggtttacgtttggaattttattattttggttgaggtgggaggataatttgagtttaggagttcgagattggtttgggtaatatggttaaattttgtttttataaaaaatataaaaaattagttgggtatggtggagtgtatttgtagttttagttattcgggaggttgaagtgggaggattttttaagtttaggaggttgaggttgtagtgtagtgaattgtgattgtgttagtatattttagtttaggcgatagagtgagattttgtttaaaaagaaagaaagaaaagaatgaaagaaagaaagaaagagaaagaaagaaaggaaggaaggaagaaagaaagaaagaaagaaagaaagaaagaaagaaagaaagaaagaaagaaagaaagaaagaaaatattttagtgattttagtggaggaagtgggtggggtagagatgagttagattggttagaagtcgatatttgattgaaggaggatggtagggtttttgtattattttttttgtttatatatttgaaattttatttaataaatatttattaatttaattaatttgtattttaaaaatgtgttttaattttataaaaagagttatgtatagagttttaaggaaaagcggagagttataaattagttagtgaattattttttaagaggttttagtttttgggggttttttttatatggtttcgatattttttttggatttgttttttttgtttttagattatatttgttttgagtttttagtgaatagggtgtattataggtttgaggttttggggttttgggtttttagtggaggagatgttggaggttgtattttgttaagatttaatttagagggttttgtagtgtatatttattcgtgacgtttatagtagatattgggtttacgcgtcgtttttcgtggaggtcgtataggtgtattttgtatttgcgtttaggttttaggttttttacggtgattttatttttttcgtttttaatacgtattatttggggtcgttcgtttttgtttttgtattgtacggtgaaggagtcgaagcggttttgggggacggtttaggagaggtttagcgagttaggggaggattttgttattgttagtttttttaggagcggttttttagcgggtttcggggtttttatgttgggttttgtggggttgggggtttttttttttgtagttgagaaggaggaagagagagtgagggggatgtttttgggtattggggaaaaggagggagaagttaaggttatgattgggggattcgaggttagtttagagaggtttatttttggggttgggtggttttgtttagttgatagttaatatatatgataagttttagggttagttgtgggggatttgggatagttattagtatagtaaaattttcgatggtttttttttgtttaggaggagttagtggttaattttataggaaggtttaaggggagttttagttttagttataagtaggtttgtggtgttgattagatttttgttttattttttattagttattattaaagagtaagagggtgatttttttatggtttttattttggggtttttattatttatttatttgttatttcgacgatagatatagggtttatgcgttggttatcgtggaagtcgtataggtttattttgtatttatggtttggttttaggttcgagatggtgatttttttttcgtgttttggtatttttattgttttgggttgtttatttttatttttgtattggattaggaagtggttaaattgtttttcgggaattgtttaggataggttgagggagttaggggtggtatttgttacggttagtttttttaggcgaggtttgatggggggttcgggggttgcggtgggaggttttgaaggttttttttttttcgggattggatagagatatggaaagagaggattgaggtgggtagggtattcgcgggattttgttgttttttggatttttttagttatttgaaaggaggtatagtgggtagagtttttatttgttagggtttcgatatggataggatttatatgttttttattattgaaattatatagggttattaggtatttgtggtcggattttaggttagagagggtgatgttatttcggttattttttatgcggattatttggagttgttcgtttttatttgtgtattggatttcgaaggagttaaatttttttttagttattatttaggagagatgtagggtgtgtgacgtggttttttttattgttaatttttcgaggtggggtttaggcgttggaggggtcggggtcgtggttttagttttcgttttttttttgtcggttggtttatagagataggtagagatagatggttggtgtgtcgttgtatttagatttttaggaggagtgagggaggagagggagtgagggtaagtagttagtaatcgaaagattagtttttgttgtatatgggtgaattttaaaagtattgtgttaattgtaagaaatgaaatataagagattgcgtattgtgattttattatatggagagttaaaatgttgtttttaggatgatcgaaagtagatagtggttgttggaggttgggattggggtaattgattttaaaggggtataaggaaattttttggattaatggaaatgatataaaatgggaagtttagagattttatggtttagttagattaggagagttaggcgggaaggaggtataggtgttttagttgtcgtatatttattagtaatggcgacggtcgagatggggtttatacgtttgtcgtggtgtagttcgtagagtagtagtttgtatttgtgggtagggtttaggttcggtacgttgatttttttgaggttgttttttacgggtattatttggggttgttcgtttttgtttttgtattggattataaaggagttaaattggtttttagggattgtttaggagaggtttacggagttttgggttacggtggttatttgtagttttttttttagacggggttttgggggacgttttgttttagtattatttatagtatttcgggtttttgagatggagatacggagaggaaacggttgagttgtttttggaagattgggtgatttcgacgggtaggattgagaggtttggagatagggttttgcgtggttgagttttgtcgggttgtgttaggggtttgtgtagggacgtggggagttggatttgagtcgagtggttggggttaaataatggtaatggtagttattataagtgatcgtttgttgtttggtttgaggggagtagagtagggatttgtagggaatgttttttattcgtggtgtcgtcggtagtgagagggttatggcgttttttgtttaggaggttatagaggaggaatttgtatttgcggtcggtatttagaggggtgatagtgatagagcgtttatggttttttacgggtattatttggggttcgtttttgtttttgaattggattataaaagagtcgaattggtttttaggaatcgtttaggagaggcgtagtgagtttggggtggggtttgttatttatagttttttaaggcggggtggggtttttgggttggcgttatttcgggtaattggagaggaaaggtttttgtgtttattttttttaaaacgattttttgattgtttttttttggggttggaaaaatttagaattgtttaaatgtttagtgtttttttaaaatatttttattattttttatttttattattattttcgtttggtttatgtttttttttttttgatttaagtggggagggttatttgttttgagttatttttaggaaaagagattttttagttttttgttttattttatttttttttttgtttagttttttttcgttttttatagattgtttttttagtagggtgtagttttttatagattgggtttttatttttttttatttaggagtatacgatttggtcgtgatttggtcggtttttgaggaaaggggtgatttggtcggtttcgaggagcgtaggatttttgatgggggtattcggtaggttagggaggtaggatgttacgatataggtagtttttattttttttcgtttttttttttattttgtatcggttggttcgggagaattaaggtttttattgggtttggtgaaggagcgtgggttgtttgtgagaatgttgagggggatgatgtcggggagtttaggtagggaagggatttggtgtttgtttgaggagttattttagggtttgagaaggagttggtttgttgtttttttggacggtgaggacgttgacgatattgttattgtaagttttttggtaatagggagtttttaggggtaggggagggtttggattgaattttcggaaaggggtatagttgggttgggtttttttggtttttaatttttgagattttaggaggagggtagagaaggaagggtagtttttgtaggaggtatatatgggtttagataggtttgagttaggagggtgagaatttgggtgagagttataggggagataataaagatttttaggaggtgatggattcgtaaggtaggaagggtttttggtttttttcgtttttttttttagtatttttaggtttttatatttattttgtaggaagaggtttgtaggggttttttttatttaataaaagtggaaattacgagaagagaggtagagttagtaggggatagtagatttaggaattggttttatttttttggtttttatttgttttgcggtttttttttttttttttttttttttggttttttttgagacggagtttggttttattatttaggttggagtgtagtggcgtaattttagttttttgtagtttttattttttgggtttaagtgatttttgtgttttagattttcgagtagttggaattattagtatttattattatatttagttaatttttgtttttttagtagagatagggttttgttatgttggttagattggttttaaatttttgatttgttttggatttttaaagtgttgggattataggtatgagttattgtgttagttttatgtggttttttaaatgagatagagtaggtggataaagggaagatttagtagagggagtgaagagaagggtgggaaggttgtggttttaggtttagttgtgtaggggtttattttattcgtttttgtttttatagagattgggttgcgtcgttttttattttggattttaaagagtaggaatttgtatttgcgggagggttttaggttagggatagtgatttttcgttgatttgtagttacgggtattatttggggttgttcgtttttgtttttgtattgaattataaaggagtcgaatttatttttagggattgtttatgagaggtttatagagttaggggttatattcgttattgttagtttttttaggcgtggttttaggggaggtttggaggtttttgtggttggggttggtgggaggggagttgggatttgggaagataaagaatatggttgagatttttgaggggagaatttttgggttttgagggttttaggggggttgtgaattgagatggggaatagttatatttttatttttagatttttaattgaaatgtagtatttttttttaaaattaatatagaaaatttattagagtagaattattgtgattttgttattaatagaaattatagatgtttttatgttattttagagttattgtagaaattttaaaatattttttatatttattattgtttttaaattttgtagtttagtaaacgcgttattaagttttgttatttaatgaattagtaaataagtttaagtattattaaatcgtaattttggatttttaagaaatattttgggtcgggtgtagtggtttatgttaggtcgaggcgggtggattatttgaggttaggagtttgaggttagtttggttaatatggcgaaattttgtttttattaaaaatataaaaaattagttgggtgtggtggtacgtgttcgtaattttagttattcgggaggttgaggtaggagaattgtttgaatttgggaagcggaggttgtagtgagtcgagatcgcgttattgtattttagtttggatgataagagtaaaattttattttaaaaataaaaaagaaatattttgataattgtttataaatataatgttttttttgtaattttatatagtttattttatagatttaaaaatattgtttttaggtggggtaggggttttattagatgttatagtataataattatggagaatttgtgtttaggaagttatgaggggtaggaaggagtttagagtaagagtgaggtagttttttggagagatgaaaattttttagggttgggatggaatgtagtgtaggtaggtggtagaggatttttgagaagggatttaggatgtaaagtatttcgttttaataaaaaagggtagaagtaggaggtggtagttgtgtttaagttatagtagggttgtaaagagaaggggtggaaatagttgtgggtagtcggagagggggagagaaagtttgtggttggatttaggttaaatggaaataagatatttttttgggcggggggtagagtggagatggggaaggagttggagggttgagaaggttttagttttgggaggagtaaaggggttagggaatagaaagattggtagggttatcgagttagggtttgaggggatttagttttttagtgagggtgcggtggtattaaggtagggttggaagaagggttatggggtgggggagttttgggtaattagagatgaggattgagtttttttattatttattcgttacgatgattatagatagggggtttatgcgttgtttattatgtagtttatatatgtttattttatatttttttttaggttttaggttgtagattgtgatttttcgttggtttgtcgttatcggtattatttggggttgttcgtttttgtttttgtattggattatgaaggagttaaattggttttcggggattgtttaggagaggtttatagagttgggggttatatttgttattgttagtttttttaggcgtggttttagcggggatttagtggttggaggggtttttttttgttgtggggttgggatagagatggtagggggttgttagtaaagaatttttttttttttatagtaatgatgtttagttatttattttttattttttatttttgagatggagtttcgttgttatttagagtagtgggcgatttcggtttattgtagtttttgtttttcgggtttaagcgatttttttgttttagttttttaagtagttgggattataggcgtgcgttattatgtttgtttaattttgtgtgtgtgtgtatttttagtggagacggtatttgttatgttggttaggttggttttaaatttttgattttaggtgatttatttgttttagtttttaaagtgttgggattataggtgtgagttattatatttagcgatgtttgttgtatttgtggaattcgtatgatggttttgatgtaaaagcgtattgatttgaatatttgtttggttaatagttttttattaggtttttgttcggtgtttgaggttgtatttgttgggggagaagagtattaattattattgatattttgggagagcgttgaaattttatttatatgttaatgattttagatttatattttttgtttagattttttttgaattttagattagtgttcgtgtaacgttttttttggaggtttatttgtgtgttaaatttaataagtttaaaattgagtttttgagttttttgatatttgttttcgttatagtttttttattttagtaagattataattttttttttttgagacggagtttcgttgttgttgtttaggttggtgtgcgatggcgttttttcggtttatcgtaatttacgttttttgggtttaagcgatttttttgttttagttttttgagtagttgggattataggtatgtgttattacgttcggttaattttgtatttttagtagagatggggtttttttacgttagttaggttggttttgaattttcgattttaggtgattcgttcgtttcggtttttttaagtgttgggattataggtatgattttttacgtttgattaggattataattttatttttttagttgtttagatttaaatcgttagagttattttcgagtttttttttaaattttatattcgttttgtgggtattcgtttgttgttattatttttagagtttgatttttttttgttatttttaagtattattggttttttttggattattataatatttttttaggttatcgttttttgtttttatttttttttagtttgttgggtttgtagttagaaggattttgttaatatattagttagagttggttttcgtagtggtttttattttatttagggtgaaatttaagttttgtattggtttttgaggttttatatttattttttagattattttttattgtttgtttttttttaattttattataaaatatattgtattttttattgtttgtagatatttggggttgtttttcgtttgttagtttttgtatttgtttttttttttgtttgggatgttttttttttaaaggtttaggtggttgtttttttattttttttagggttttttttagatattgttttcgtagtgaggtttttgttgtttttttattaggttttgtttttttttattatttattattgttatattcggtgttattgatatatttgtgtaatttgttgtttgtttttttttattagaatgtgagttttttaggtaggagttttgttttatttattgttgtgttttagtttttggtatatagtaggtgttttatagatgtttgtaaaataatgagtggtttataggtttgggtttaggatttgtagatttttattattttcgtatgaggaagtatttattagtgagtaaattagaaggtggttttaagaggtaaaatggtagagaaggtggttggatgggtggggtttttaagaatttgtttttttggtttttttcggagggtaagataaggttttaagtaagtgataattgtttaaaataggttggtgattaggtttcgggtagatagaaatgagttaggttggggagggtaggtatggaggtagttgaggtggtgggagggagtagagtgattattaagtattgaatatttattatgtataggtattaggttgggtatttttttttattttatttgttttttaattttatttgtttttgtagtatttattttttgtttttttttgttttttttgtatttttttttatgagggaatgaaaatgttttttattattaagttttattgttggtggtttggattaattggaaaggtataattataacgatttatgattttggtagtttttatgttgtatgtgggatagtttttttttaatttagaagtgtgtttaatgagttttacgtatttttttttttggtaattgtattgtgtgtgttgttagatatagtttttagtttggcggattttagttgtttcgtttttttgttgttttgataatgcgtattgatgtttattttttttttaaagggttttatttattttatttaggacgtgtaaaatatatgttttaaaatatttagtattagaatatggatatatagggatttttttacgggaaggtttgagtaaaagatgaatgagttgagaagatgttagatatgttatattattatttttaatcgtgataataagttgggtagcgtttatttttttttgaatatgaggaagttgaggttttaggagaggaggtaagttttttaagattatatagttggttgggtacggtgttttacgtttgtaattttagtattttgggaggttaaggcgggtggattatttgaggttagaagttcgagattagtttggttaatatggtgaaattttgtttttattaaaaatataaaaattagtcgggtgtggtggtgggcgtttgtaattttagttatttggggggttgaggtaggaggattgtttgaatttgggagttagaggttgtagtgagttgagattatgttattgtattttagtttgggtgataaagtaagattttgttttaaaaaaataataataaaataaaaaaataaaaattatatagttgagaatagaggaagataggaaggaatttagtttgttagatttttaaattttatttatttttattgtatcgatttggttagtgtttgatagagtttatttttattttagggattaggtatagggttttatagagtttagtgtgggtttttgggatagagcggtagagggagggttattttaggagtagatttggtagtatgtttgggtttggtattagtttttattttataattttaggttttaaggatagttatttagggtggttttgtcgtttttttttttttagggttgattgaggtaaagaaaataaattgagggtggaaggttttggaaatgaaattaattaagttatgatgaggttgagtttggtggaattatagaaattatgttttggaaaattatttatttttttatttttaatttttaaatttttttttttatagtaaaagttatttttgagaaaggtgtgtttttgtttttgtgagtaaaggaaaaaagagattttttttattgtgattaaatcgggtaggttagttcgagggttttagaggtattgttgtttatttagttttttgggttgaggttttggagaggaggtgtttaggttggttttgtgtggtggtggatgtggttttgtaattaggtttgagagaaagggtggaagggatgtttttttttgttgtaaagttatttattggatgagtattaaagaaagttttgtggtcgggcgtggtggtttatgtttataattttagtattttggaaggttaaggcgggtggattatttgaggttaagagtttgagattagtttggttgatatggtaaaattttatttttattaaaaatataaaaattagttaggtgtggtggtgtatgtttgtaattttagttattcgggaggttgaggtaggagaattatttgaatttgggaggtaaaggttgtagtgagttaagattgtattattgtattttagtttgggtaatagagtttaaaaaatagaaagaaaggaaaaaaagaaagaaagagagagagagagatagaaagaaagagaaagaaagaaagaaagaaagaaagaaagaaagaaagaaagaaagaaagaaagaaagaaagaaagaaagaaaaagagagaaagaagaaagagaaagttttgtggttaggcgtggtggtttacgtttgtaatattagaattttgggaggtcgaggtaggtggtttatttgaggatttggagtttgagattagtttggttaatacggtgaatttcgtttttattaaaaatataaaaaagtaattaggtgtggtggtacgtatttgtagttttagttatttgggaggttgaggtaggagaattatttgaatttgggaggtagaggttgtagtgagttgagatcgtattattgtattttaggttgggtaatagagtgagattttgttttaaaaaaaaaaaaaaaaaaaaaaagataagaaagaaaagaaagtttgttttaagttgtattgatgaagaggttaatgttttacgcgtatttttttatttaagtattaattagatttgattttgtttagtttttgagattagaggagatgataggatatttttagggtggtatggttttagatttatgtgtattttgattaagtaattgaattagttaaaggggataaagtagattttagagtaagaatatttataataatttttatagtagatattggtagtatatttatttttgttaggtttatttttgatgttttatatttgttaatttatttaatttttataataattttgtgaggtaggtgtttttattttacggataaggaaatagaggtgtagaaagtttaaaatttgtttagggttatgaaagttggtggtacgttagtttttagtgatatgttttttttaggtttttttttggtaggtagttttaaggttttattggagtaaggagagtaattggttatagggaagttgggagttagtagtgggagggaattaaagtaggtttttgttttttatttatttgttacgtttacggcggatatcgggtttacgcgttgtttttcgtggaggtcgtataggtgtattttgtatttgtgttcgggttttaggttttttacggtgattttattttttttgtttttaatacgtatcgttcggggtcgtttatttttgtttttgtattgtacggtgaaagagtcgaagttgttttgggggacggtttagaagaggtttagcgaattaggggaggattttgttattgttagtttttttaggagcggtttttcgggggatttcggggttttcgtgtttagttttgtggggttgggggtttcgtttatatttttttgaggagttgagagaagagatagaggtataaagggttgttggttttgttgttgttgtttatagatgatagttatggaaatgtttttacgttgtgggtttaggggttttgtagtttttgtatttgttattcggttatttacggatggagaaggttgagatagtttttgttttattttgttttggtgggttttgtgggggtgaggggttttttttcgtgtttgagaaaggagttgagatgggaagagaggaagtttttgagggtttttttaaattacgtttattgatagtgttgattttagatagtgaggagggtagtgaggtttttttttatttgtgttttttttagggtattttggttgttttattttttatatgaggatttgattatggaatgtgtttttgttgtggtttttttaggtagttttgttttttttttttttttaattttaaggaatgaattgttaaggtagggttttaggtatgagtgggagaaaaattttggggtgagtgggatttaaggagagatatgtttttttttggttggttttggaattatagttttgtgggtatttattcgttttttatagttaggtttttgttgaggttttatggagtggggagattgtggtataagggaaattagtttttttgtgatttgttatatgggggattattttgggatagtagattgaggaaagaattggtaagaatgataatttagaggaagggagggaggtggggagtaaaaaagattattgggaagtgagagagttagggagaaattgtagtttattttgaaaatgttttgttgttttaagtattattttaagtgtgtgggttttttttgtttttgtttttgttttttttttgagatggagttttattttgtcgtttaggttggaatgtagtggcgcgatttcggtttattgtaagtttcgtttttcgggtttacgttatttttttgttttatttttttgagtagttgggattataggtatttgttattatgtttggttaattttttgtatttttagtggagatacggttttatcgtgttagttaggatggtttcgattttttgatttcgtgatttattcgttttggttttttaaaatgttgggattataggtatgagttattgtgtttggtttttttaagtgttatatatatattaatttatgtaattttaatagttttgtgtagagggattgaaatttagttatttgatagaagggaaagttgaggtatagagaggttaagtaatttgtataaggttttataggaagtaagttgtaaggttggtagtgagattcgggtagttggtttcggagtttttgtttttaattattatttatattattttttattaaataatttataggttaggggaatggtattggatagggaaaggttggggatatggaggaataggttgggatgttgggttgaatataatttttttgttttgttttaagggggttgggagttaaggagtcgggagttgagaggagttttttttatgttgtaaaaaggttagagaaacgtggtgtttttgttatttggatttgttatttttgaatatagtagaaatggtaggaggttgtgggtagtaggtgatagaagtttagaagtgattatggtttaaattagattatgaaggagtttagtaaaaattgaggggtgagaatatagtgatcgaatggtgaggatatttgtggggaggatagttttaggtggaaggatgagtttaggtgtttggaatgggggaaaataggatttgtttttggagatgaagaagtgaggttgaggaagagatgaggaggtggaggttggatgagggggatttggtatgtagaggataggagagtagtgcgggaggaagtgggtggaggttttggtaaaatgagttgagaaggcgaagatggagggaggttggaaggagttttagttaagtttcgtttataggatggggttagtaggggagggaggtttggtagttatgatttattagttttggttattatagattcgggttttatacgttgtttgttacgaagttcgtagaggtttattttatattttcggtcgggatttaggtcggggatagtaattttatttttatttttcgtaataggtattgtttggggttgtttttgtgtatttttgtattggattatgaatgagtcgaaggggttttgggttattgtttatgagagacgtaaggagtttggggttacgtcggttattgttagtttttttaggaggggttgttttaggaatttagggcgggggggttttttttttttttttggagttgtaaataaggagatttagttaggtgttgaattggtagtttgggattggggtttggggtttcgacgggatgttatatttatggggggtggggggttattagtttattaattcgagtgttaaatttttgggaagtttgatatagttagggtatgatatattttttgggttacggggagttgttgtttgggatggaaggggtttagtagtgcgggggagtttggttgttttttagttttggagtggggtcgggaagttggagttagttgttttgttgggggattttagttggttttgggttgaagggaagtgtgtatggggttgagaaggggttatatgggggttgaggtggttgttatttattagtggtgttatcggtcgtgagggggttatatcgttttttgttcgtaattttaaatagagtgaatttgtatttgtggttagggtttagtgaggagataataaatgaacgttcgggtttttttataggtattatttggggtcgtttatttttgtttttgtattggattatgaaggtgttaaattggtttttagggatagtttaggagaggtgtagtgaatttggggtagggtttgttatttataggttttttaggtggggtggagtttttggatttgggttattttgaggtattaggaagagtgggtagagagaagggagagatttaggtttaaggagaatggggaagttaaattttatataggaatgttgtgtgaggttgtgtaggttgtttattgtataaaagtgtatttgttgagggagtatagagggattgaaatttagttagtattttgtttgtcgagttgtgtgttttggtgaggagtggtgtttattttaaggaatgggtgtttttttttaaacggtatggaagtattgcgtggattagtgtggttttgtttttaattataaattagagtagtagggagttttagaaagaggggagtttagttaggtttttttatatttttatagttagggaaatttttttagtataatttttattgtttttaagtttaattattagttggttttttttttaagagaggagagtataatttttgaagcgttttaatgtgggatagttttttttatttatgttgtaggtttttttttttttttgggaattttgatttatggatggattttttcgtttgtagtattgattttttattttttagtagttgtgttattagtattttaataagttattgttatatttttttttatttttattttgtgtgtatttttttttagtttttattttttttttttgtttttatttttagtttagattttagaaagtgatgtttatattgattgtagttatgtttttatttttattattttttcgatttagttttatttttttattaggtagtagtttttatgtaggttaggggtggttttgttattgttaaattttgtggacgtttcgtagtttttgaattattgtttcggaatttgataagtttaatcgtatttttttttttggagtttagatagtattttttttggttttgtttttttttgtaagttatttcgtaagttattttgtgggtttttttttttttgttttcgttgtgagtgtaggttgtcgatagggttttagtggttttgttttttttttaattttatacgattattttggtgttttaatttttttgatttataaagtaggtatgttttttaggtgtgttttatggggtgtgatgatttatttagagaatattttgattataattgatttttaataaatgtataaaaggtatttatgtaagtgttttttagatattgatttaagtttatttaaggcgttgttttttatttttgttgttttttgttttagggaatgggattgttttatttagaattttgggggttgtttggtatattttgttttttttcgttttttttatttagttttattgttattattttagttgatttattattattttttttttttttgagatagggtgttgttttgtgtagagtgtggatagtatttaggttggagtatagtggtataattatggttttttgtagtttcggttttttgggtttaagcgatttttttattttaagttttttaagtagttgggattataggtacgtattattacgtttggttaatattttttgttatagtagagatggggggttttattatgttgttaggttggttttaaatttttagttttaagcgatttttttgttttggttttttaaggtgttgggattataggtaggattaattttgttagtttttattagtttttaatttatttttttagttagttttagtagttattcggttatttgtaagataaatatttagttttattatttttttattttattttttagaggttttttaggggttttcgaatgaggtttaagttttttagtatagtataggaagttttgagattaggttttttggtattttttatatgttttgttttttagttagaggaaattgtaatagtgatttttttattggttatgttttttttattttatttatcgtgatttttttaggttgtattgagttttttaaattttttgtttgttttattattattttttttttagaatttagtttatgtattattgtttttaggaagttttttcggagtttttaaagtaggtttttaaagtattgagaaaatttttttagggtagtatagagggtagggtgttattgttgttatttatagattttggttttagttattagcggattatgtttttttttgttaataaatttatataggataaatttgtatttgcggttaggatttagggaggtgatgacggtcgagcgttggggtttttttacgggtattatttggggttgttcgtttttgtttttgtattggattacgaaggagttaaattcgttttcggggatcgtttagcgtaggagtaaggagtcggaggttttgtttgttatcgttagtttatttaggcgtggtgggtttgaggattttttaggtttttttttatttttgtttggagtttgagaggtaaaagtaaagtatagtggatttaatcgtttttttgtttgtgttttttttttttttttttgtttattttattttattttggatagattttttttcggaagattttatttgtttattttttagtgattagtttttttggaagaggggtattttttttttaatttttgtttttttttttgtgatagtttttttattttttataaggttttggtttttttgtatattaggatttttgcgggggttttaggtttttttggttttgaatgagagttttaagtttttttgttgtagtattagagtagtttgaaagtttttttgtttatttgagttgttgttttttttattatttttttttttagtggtgagtttgatttggagttgggggatgagttagttattttggttttatagagaggaataaagaggggatgtgaaagttaggtattttaggatttgttttttattggttttgtaaattttatttatgtttgaagttttgatggttgtggagttttttgttttaaggagtttttatttttagtagaaattggttgatgggattatggattgttgtttattgtaaattaggtttttagggacgaggtattgggggttgagggttagtgtttagaggtttttttatgtttattttgaaagatttatagggtagggaagggtagaggagtaatcgaagagtgggggtaggggatagggtaaggaaagttgtaggtggagggttagggatttttagttttttttttggaatttttgttttattttcggtttttttatttttgttttttttttttttttttatttatttttattattgttttaagatttttttcgatttatttttttgttgaatttgtaatttttttttttttttttttttttttatttagttttaaatattagttttgttttttattggttttttaatatttattttatttttgaagttttaataattttagttttttttttaattttaggatattgatttgagtagagtttaagatgtatttataatgttttggtagatgatggggttagagggtttgtttttaggagggattttatgaagtgatagtttatacggggttttaggagggggtggaggtattagagtttggcggacgttttttggtagtatttttttatgtgttttcggtttttcgggtattcgtatgcgtagttggaagtaggtaaaggtgttaggttgggcggtttagattatacggaggcgttttgttttatttttgtttagtatttttaatttttttagtttttgggggcgttgttgtaggagaggagtttgggttttttgcgtcgtcgaggggtttgagggaggaggtttatcggtagtttttaagaggtttaagggtgaggattttgggaaggggtagggtgagaaaaagaggagagtttagtatgagaattagaaaggaatttttagtttttaggttttgttttttagtttttaagagttttgttttatttttatttttggtttttttatttgggttattttttttttttaaaggttagttaattttttaaatatttttatttattatatttttgagtagacgggtttgtgttttaggtaggtaataggtaaaataaagtttgttattttttattttataaggtttttatgatttttagttttcggagatttttatgtttttttttatatatattttttttattgggtggtggttaggtggtttttattagtgttgtagtgagaagtttggaagaaagatagtggtgttagagagggaggatgtaagaggagagtgggtagtgggaagagagagagggtgtgggggtggatatttaggttaggtggtatttgggttttatgggggaagaagaggtttattattttttttatagtagttatagggtgttttttttttaagtttagatatcgtttttgtgggagagattagtataaagtgagttagggggtttgaaaagttagtttaagaagtagtggttttatttttttaatatatagttgttgtttgatggtatttaggttatttttacgtagttttgatgtgtttttttaaggttaaggttaaattgtggaaaatagtaattattaattatagtttttagttatttttattatagtgagttagaacgggaattattgtttttaatttttagtttatttaaattgttttagtgaatttttgtaggtgttttaattatattattttttattgtttaaaataataattttggaagtgtttcgggaaattttaaagaaggcgttgttttgattttaggtatttataggatggatgttaggattttggggtggggacgttttttagggataatggattcgtgttttgttttgggggttttttggagtttcggttaggtagggtttgaaggtagaagggggtagtggggggtggtagtgggaggaatttatgaatgtaggttttaacggtaggtgaggttggataagggataggtgtttcgtggttttagtttatattatttgtggtggtgatgaaggcgtaggatttggaggtttgtttcgttcgtatttcgtggatttttacgtggtaggtggtgtcgggtttgaggtcgggtaggttgacggtgcgcgtggtgttcggtatagttagtttatcgtcggggttttttgtaggcggttgaggtcgttagcgtagtattacgcgttcgaattggtcgcggagttcgtcgagagatacgagaagcgcgttatcggcggaattgtttagtatttttggtttggggtggcgggacgtagttattcggtcgacgtttttaggcgagaggtcgtagattttttggttggagtttcgttttttggtgtcgggattagggttggcggtggggcgggggtggcggggcgggggtgcgggggagtcggttggggcggcggttaatagacgtcgttgtaagtatttatggatgtggcgcgttatcgacgtgtaagtttggttggttcgtagtgggtagtcgtgagttcgtaggtggcgttttaggttttgtatcgtgtcgcggaaacggtttagttcggtcgttaggttgttttaaggtcgtcgtgggggttgggataggtttggtttgggcggggatttttttttttttttttttgttggtttcgagggttaagggggtcgtgggggtcgcggggttggggttggtcggggtcgggatttggggggcggggttggggggcgtattttcgggtaattgtagtggtttggtgttgttaggggtaaaaaaggggagaataggttagtggtagttttttttcggtattttttttcgcggtagtttttttttcgattttttttattagagttagaggttttttttttgtgttttagttttatttggaaagagaacggagggaaatcggttagtgtttcgtagtttttttatttttttttaagtttattattgttggtgttttagaaagaagagagaagttcgtgggtggggttttgtagttgaaggagagaaaggggagtcggggaagagaatatgagttatagcgaggtgggtgtttttttgttataggaaaagaaaaatatttaggtatttgttaagaaatttcgaggtttagtggaaaattattgttgtgagatttattttttagtaattttaatttaaaagttaataggattgatgatttttaatttgtttaattttagttttataagatttattagtataaggtttgtttcggtatttaaatttaaaaaagaattttttttaattgattggattaggtagtattttttatttatttttttttttggggttattttttttataggttaatttgtaatttttttataggattttaggtatttgagggttttgtttttttagtggttttaggatagagtaaggtttttagtaggtgtttcgagattgttatatatttgttagaagtatttagaggagtttgtgagttttgagtttgggtttttgaggaggaggatttaaggttgggaaattagggtttttttttaatttttggttagttatatttgtgttggttttgatagaagttgggtagttgattgttcggtttcgtttcgttgtgatagttattatatattttacgtttggtattaggttagttagtagcgtttcgtttgttttagggggtatttttagttttattttttggttgtcggtattgacgtaggatattataaatcggtttattttagtttggggacgtagttagttaagttttagtgttgtcggtgttatagttattattcggaggttttggggtttatcgattattagttaggttaaagaggaggatttaggtgggtgtttggttttttaattattatttttttttttaagagtttagtttttatttagttttttttttttgttttttcggagggtagattttttttttagtttagatttttatttaggatatttttttttatagttttagtttttattggtggtgatggttttggaggtaggaaggttttagttggtttttcgaagggttcggatagtgatttggtatttttgtttaggggttagttttttttggttataggttgaggtagagtttggaattcgtgttgtgaatggggggttcgttttttttgtttgtgagagagagtattaggtggtttaggggttggtatttttgtttttgttgtttaattttttttattttttttttttttaattttaaatagtgttagtatggtattgtgtggaatttgattttgtataagttggggagtaaatatgttgagagcgttaattttttgtgagttattgttttaggcgaggtatatatatgaatttatttaatttttataataattttacgaaataggttttattagttttattttatagataaggaaattgagatatagaaggataagtattttgttaacgttattaatattaagaaaatggtaagaatttaggttttagtagtgtgattttagagtttttttttatgggtattttttatttatttgttagagtttttttttatgggtatttcgtgtttatttgttagaattttatttaatatgtattaggattttttttttagttttgttttggtaattttgattatttgggtatgaggagtttttttttaagtttggttttgttagaataaatgaagtagattaaggatgtttttttaagttgtattttttttttaaagggtttgttttattttgaattttttcgtagatgtttgtttatggttgtgtaataggagtgggattcgtattataattttttttttgagggattttttttgtttttttattcgggttgtaggttttttaaaataagaattatttgtttaaagttttataaatatgttttttgattgttgattttgtatttggtattatgttgggtattggagatataaaaataaaatatatggtttttgtttttaggtagttgagattttaatagttaaatgtatggttatattttgaatatatgagatatttataataatttttatgtttagtaaatgtttgtgagaaaataatatttttataagtgtatatttaaggaattatgattatgtgtggtgtttttaaagggaatttattggattttgttttaggtagggttttttggaatgtttattattggggaaataggaggaattgtatatttgtgagtattttaatagttttatattttgttgtgttgtttagttaggatagtcgttaaggatgttgtgttttgtttagttatgttggttgtgatggggatatttttatttagttaagtaggattggaaattttaaaaggtatttttttaaattaagagaattgtggggaaattaatatagtaaatatcgaagtataaaattagatgagaaggttacgtagagatttttgggttgaggatgaagtaaagttttgttagttttttgggttgaaaagtttttttgggtatataggatttttagtttttttttatttattttgttttagaatattttagtttaggaagttttgggttggttttaatttaagatttatgaaatttttattttttttagaatttatttgtttattttttttgtgtgtgtgtatgtttttttttttttatttatatttattttatttttatagtcgtaatatatatattttggatgttttttgatgatgtttggtttttttagtgaggtaagtttatttttagagttttttttttttttatatatattttttagatattttttggttttttttgagatttatttgggaatagttttttgaaagtttattaatttaatttatgttttttacgttttttagtattattttattggtttgaagtaggtttttttttttttttttttgagagggagttttgtttttgttgtttaggttggagtgtaatggcgcgattttagtttatcgcgagtttcgtttttcgggtttaagcgatttttttgttttagtttttcgagtagttgggattataggtatgcgttattatgttcggttaattttgtatttttagtagagacggggtttttttatgttggttaggttggtttcgaattttcgattttaggtgatttatttattttagttttttaaagtgttgggattataggcgtgagttattatatttggttttgaagtagtttttttaaatagatgttggtagttggttttgttttttggtaaagtttggttgttttattgattttttttttttttgagacggaatttcgtttttgttttttaggttggagtgtaatggtacgattttagtttattataattttcgtttttaagatttaagggatttttttttagttttttaagtagttgggattataggtatatattattatgtttagttaattttgtatttttagtagagatggggttttattatgttggttaggttgtttttaaatttttgattttagatgatttatttattttggttttttaaagtgttgggattataggtatgagttattgcgtttggtttgttttattgattttgtttttgggaagttttagagtttattttaatattaatttcgtggttttagatgaattttattttggttggtttttggagtttattttatttttattgttgtttttagattagatttaagtaaaaatttttttgaggttgtgaggttttgagttttagtgaatatttagtttagttttgatttttaggttgtaggatatatttagataaggaatatttgaattttttttttatttaggaatttattttttttagtttttttatgtttttttttatatttatagtggagttagtattttgtaaaatagtaatatttttttatttagggggttttaggttggaggggtattagaattatttggagggtttgttgtaatataggttattgggttttgtgtttagattttttgatttagtagatttagtgggggagtttgataatttgtatgtttaatatatttttaggtgatgttgatgttgtaggtttagggaatatattttgagaattattgagttagagtaatagtgttatatatatagggagaggagaaattttttttttttgtattttgaaaaataattttaataattaggtatgttttttgatttggaatagtagagtttgggttttgagagagaagtgtttttgggaagagggaaggtaagaggtagagataggtttttaggatgatagtagtagttagaggatagatagttattgaatatattttgtatttatagaaatggataaagggtagttgggtattgtggtaggtgtttgtaattttagttatttgggaggttgaggtaggagaatcgtttgaatttgggaagtagaggttgtagtgagtcgagattgcgttattgtattttagtttgagtaataagagtaaaattttgttttaaaaaaaaaaaaaagaaagaaagaaaagaaaagaaatagatggtatttgttaaggtagaaggtacgatgttagggattagttatagatagtagaaagtatggtttgagggtgggtagtttaggtttaagaggagtgtttggggattaattttataggagtgttttttatatttaggtttagagaagatttagaatgtgatagatgtttatatcgagagtagaatggatgagttaagaatatggttaagtttggtataggttaatttggtattattattttggttttgagtgagggagaaagtttagggttttaattggaaagcggcgtttttgataatattaaggatcggtttgtatttatttatttagagtaggagataattgttgttttaaaagttttttttattttaagtgtttattttaatttttttttttttgaaattttttaagaaatttttttttcgaagttttatttttttaagattagagttatgtaaataatatatatagagaagaagagagtgggagaaatattttaaaatgttagtagtgtttgttttagtgaggagtagttaggaattgttttttttttttttagttgttaaatttttgtttcgtgattaaagtatttttataataataataaaaaaagatgtttaaatagaagaaaaaatttaagttattttggttgcgttacgaagttgagatttttgtttttgttttggttggagagtgaggagaggtagaatatagtagggggttggtttgaggagtataatgataagataaagtaaagtggagtgaggatgatagtttttttgagttgtttttttttgttttagtgtttttcgaggttttaggtttagggagttgtttatttttatagagttttggttaagttgatgaagatgaggatgatatggtttatattttatatggtatttgtgggatgatgtaggaaaatatgagttggatggtagaaatgttagaagatttgtagttggggaaacgattatattttaaaagtttagtttgtataaagggaggttttaaataagtgattataaggttttgtttttagggtgttttttttaatgttttaagagtaagttggatggttaggagtggtggtttatgtttgtaattttagtattttgggaggttgaggcgggtagattatttgagtttaggagtttaggattagtttgggtatgtaatatggagaaatttcgtttttattaaaaatataaatattagtaggttaaggtggtgtatatttgtagttttagttatttgggaggttgaggtaagaggatgatttaagtttgggatgtagaggttgtagtgagttgagatggtattattgtattcgagtttgggttatagagtgagattttttgttttaaaaaaaaaaaaaaaaaaaaaaaaaaaaagagtaagttggagggagatagagaaaaaattggtttgtatgtattgatgataaggaggtgggagatgaagtttatagatttaaaattattgtaatagtttagatagtttggtttaaattaaaaaagataatattgaatagggttaaatgtaaaggtttatatttaggtgaaaaaaaaaaaagtgtatatagttgaatgttgttttttttttttttattttttttttttgttaatttgtattttttaagttttttgtacggggtttatattatttttataattaaaagttatttaaaaaattaaatatgattaaaatagttgtttgtttgtgtgattataaattgttatacgttagttttgagaaaagtgtttataaatttagagtaagttagtgggtttttttttgtttttatattttgggggtatatgaaaaaagtaagaattataggaaggtaaaggatttagagaataaagatttagggaaaaggggcgaagaaattgggaggttttgtttgaggaatgaagatattaggttggtgtttttaaatatttgaaggtttgtggtgtaggatatagggaaagtaaaaaatattttagttgttgatgaatatttagttagggttaacggataggtgttagaataggggtagacggattttgtaataatgataatagttaatagtgatgattaataatggattggatagttttaggaagtattgagttttttgttattaggtgttttaattgtgtgggattaatgtttgttggagatgttgtagaggttttagtgtttagtgttaagtaggttaagaaagtttttatagtagttttaggtatttagttatttggatttaattaatgattatttggaattttttttaggaggtgagttttgtttttttgttttgtttatttagtttttttttggagtttggtattttttttatcgtggggatgaattgaattttataggtatttacggggttaggagtcggggtttattttgttcgaattgttgttttttttaagagatgtatttttatgtttttaatggttggtatttttgtttaagagaatgggttagggaaagttggttagtataaggtaattatttttatttatagttttttttatttagggatatcgaagaggtttattttaatttttatttttttttgttagtggagaatagttgatagagggttgaacggggtttggatcgtttttattttttttttatttttaggagtatagaatttttttaaatgtaattaaatgggttttaatttgttttttagagatttgaaggttagttttgtttattggaaagttttatttttgtggttttgttgtttttggtgggtattggttttttggaatgatatgttttttttttatttttttttaggtttaggttttttttatggtttttgtttatagaattatagttttagagtatattggggaaggttgtttgtttatttttttcgtagttttcgttagtatatttatttttgtagatatagttgttatcgtgatatttttttcggttacggtagttttttgggtatgtttggatggtatagttagggtttcggaagttttttatatatatatattggtttgttcggtatagttttcggggttcgtagtttttagggtaggcgttggttggaggttttttttgttcgtagtttttatcgttatagtttacgtggtataggtatattttttgtatatatcgtttacgttttcggtagttagtcgggtatatgcgggtggtataggtagggtcggtgtagtttgggtcgtataggtagcgtttttttttatagcggtttttttcgtggtagttggaggggtaggtgcggatgttgtagtttttatttacgtagtttttttaatagatgtatatatcgttttggtatacgtcgtgttggttgtagttattcgggtattgttttatatcgtaattttcgttagagtagtcgttttcgtatatatatcgtttatttaggtattggtcgcggtttcggtagttttcggggtagttgcgcgtgttgtagtttttttttgagtagtttgcgttatatacgtatacgttattttcgtaaaggtcgtgtttacggtagttttcgggatagcgacggtttttatagtttttatcggtgaagttcgggttgtatacgtagcggttatttacgtagcgttcgcgttcgcgatagtcgttaggataggcgcgcgtgtcgtagtttcggtttgtgtatttcggttaatatatgtagcggttatttttatagcggtttcggttacgatagtttttaggatagttgcgtatatcgtagttttcgtcgttgtagttcgtattgtaaatatatacgtcgttttcgtagcgttcgcgatttttatagtcgcgtgggtaggcgcgcgagtcgtaatcggttttagtgtatttcggttagtatacgtagcggtcgttttcgtagcggtttttttggttgtagtcgttagggtagttgcgtacgtcgtagtcgttttcgttgtagttcgtgtcgtaaatgtattcgtcgttttcgtagcgttcgcggtttcggtagtttttcggatatgttcgcgtgttgtagttttcgtttgtgtattcgggttagtatacgtagcggtcgtttacgtagcgttcgttttcgttatagttttaggggtagtttcgcgtattatagttttcgttagtgtagtcggggttatatacgtagcgttcgtttttgtagcgttttcgttggttgtagtttcgagggtagttttttattttatagttttcgttagtgtagtcggggttatatacgtagcgtttatttttatagcgttttttttgattgtaatcgcgagggtagttttttatgttatagtcgttattagtgtagtttgggttatatacgtagcgtttatttttatagcgttttttttggttgtaatttcgagggtaggagcgttggttgtagtcggggtttgagaagtttgttcggtatatatatacgttttgtacgtagcgtttacggttttggtagttttcgggataggatggttagttatagttggggttagtgtagtcgggaaagtatacgtaacgattacggatatagcgattttgattattgtagttatttgggtaggatttcgaggttgagggtggggaagagggagggattttagtatttgtggggtttgagtaggtgggtttattttagtttggtttataggaataggtgtagcggtttagattaaatatattatggagattgtagagggttcgtatatttgtttgatttggagtaggaggggagaggtaagttttagttttttttttgggagagaggttgagtttatgtagtgtttttatgtgtaggtttttagttaggttagttttattttataaggttatgtttgtttttagttgttagtatgtgtaatgtatgtagttttttagggttttcgtatatgttttggttgatatgtagtttagttttgttttttaagttgtgttttgggttgtatttatattttttatggtgaggaaggagtgtttttttttaatttatattaaggatttttatggattagtaatgtttattttattttatttttttatttttttttgtgattatttgtttatttgtgttagtttgggtagaggtaggataatattttttagtgtattgttttttgagtttttttattaatttttttaggatttttagacggatttttagggtttgtatttttgaagtaaggattgggggttcggtgtttgggggatagttatagttagtggaagggggtaggttaatgcggtgggtgaatattatttgttttttttttttttttattgtgtgttcgtaaagttgagaagaggggttttttattttagtttttattgtgtggttttttggttggggagggggtcggggggttggtagtgttatattggatcgtgaagagaaggggtttgttttggttgtgtttagtagtattaggagaattaggttggaggttagagtatattgggttggtattatttaggaggttgtagggagaaagggtaggtatgagagtagttttaaaaaggagataaaatgaatttttttttttttagtatatatttacggttttattatttataagtaatttatttaatttatatgtatgtaaaaatttatatttcgtttaattttaaaggatattttttttgggtaagtttgttttttatttttttgatattatttatttattttgttttttatttttttttttattgtgtttttttatattggtttttttgttttgttttgttttgttttgttttgtttgtttgtttgagacggagttttatttttattgtttaggttggagtgtagtggtgcgattttagtttattataattttcgttttttaggtttaagcgatttttttgttttagttttttgagtagttgggattataggtatgttttattatgtttggttaattttgtatttttagtagagatcgggtttttttatgtcggttaggttggttttagatttttaattttaggtgatttgttcgttttagttttttaaagtgttgggattataggtatgagttatcgtattcggttttatattggttttttgttttttttacgagtattataagtttttattattttaagggtttttgtattgtgtgttttttatgtttgggatgttttttattttgtttataaaggttggttttatttttaaattttaatttttagttagggtagttttttattattttttattataatattttgtttttgttttttatggtatttattgttgtttgagttattagtttatttattattttttttttaatgttataatgggagttttatgagaataaggattttatttattttaggattgttgtatatttgtgtttggtatataaatgttttatttgatatattaatgttgaatgaattagtggatgagtatttagggttaatttttttttaaatatttggattttagtttttattgttttttaagaaaagtgtagattatttttttttttttttttttatttttttttttttttttgagatggaattttattttgtcgtttaggttggagtgtagtggtgcgatttcggtttattgtaatttttgttttttagtttaagtgatttttttgtttcggttttttgagtagttgggattataggtgtttatttttatgtttagttaatttttgtatttttagtagaaatgaggttttattatgtaggtaggttggtttcgaatttttgattataagtgatgtgttcgttttggttttttaaagtgttgggattataggtatgagttatcgtacgatttttttttaatatagagataggattttgtttaattttttggttgaagttggatttgaatttttgggtttaagttatttttttattttagttttttaggtagttgggattaaaagtatgagttattatgtttggttttttttttttttttatttaattttttatttttaattggatttttgtttaaatatttttaattgaaaaaaaaaaaataaaaatttttttttttaggatttatatgattaaatattaagatttattttaaaggtgtaaggatagatagatgaaatagaatagggtttagaaataggtttatatatatgtggttaattaattaacgataaaagtgtttttgtagttaagaggagaaaggatggtttttttagtttttggtgttgggttaatttaatatttttaagtaaaaaaaaaaaaaaaaaaaaaaaaatagttattttttattttatgtttgatatatcgaaattaatttgagatgaatttaggatttaaataagaaaagtaaagtaatattttttatagtaatattttatagaaaatttttgattttggagtaagtaagatttttttttttttttttttaagattgagttttgttttgtcgtttagagtggagtatattggtgttatttcggtttattgtaattttcgttttttaggtttaagtgatttttttattttagttttttgagtagcggggattataggtatttgtttttatatttagttattttttgtatttttagtagagacggggttttattatgttggttaggttggttttaaatttttgaatttaggtaattcgttcgtttcggttttttaaagtgttaggattataggtttgagttattgtatttagtcgtaagattttttaagtaaaatatatataaaatttaattataggtcgggtgtagtggttcgtatttgtaattttagtattttaggaggtttaagtgtgaggattgtatgagtttaggagttggagattagtttgggtaagatagtgagattttgtttttataaaaaataaaaagaatttattgggcgtggtggtatatttgtagttttagttatttaggggttgaggtgggaggattatttgagtttgggaggtcgaggttgtggtgagttgtgattatgttattgtattttagtttgggtaatagagttgatattttgttttaaaaaaaagaaaaagaaaaaaataaaataaaattttaggttattaaattatattattaagagaataagaaggtagttgggtgtggtggtttatatttgaaattttagtattttgggaggttgaagtgggcggattatgaggttaagagtttaagattagtttggttaatatggtgaaattttatttttattaaaaatataaaaattagttgggcgtggtagcgggtatttgtagttttagttattcgggaggttgaggaggagaatcgtttgaaattggaggcggaggttgtagtgagttgagattatgttattttattttagtttgagaggaagagtgaaattttattttaaaaaaaaaaaaaataaaaaaaaaatttttgtaaaataaaataagttaaaattaggaaatttagttttttaaattgttaaaagataaataggtattttagaaaagaatatagttaaagagttaataaatattttatttattttatttgggtttaagtgatttttttattttagtttttggagtagttaggatataggtatgcgttatatgtttagtttattttttttgtagagatggagttttgttttttcgtttaggttggagtgtagtggtgcgttttggtttattgtaagttttgtttattaggtttatgttatttttttgttttagttttttgagtagttgggattataggcgtttattattatatttggtttatttttttgtatttttagtagagatgaggttttatcgtgttagttaggatggtttcgattttttgatttcgtgattcgtttattttggttttttatagtgttgggattataggcgtgagttatcgtatttagttttttttttttttttttttttagtagagatagggttttattaagttggttaggttggttttaaatttttgattttaagtgatttgttttggttttttaaagttattaggattataggtatgggttattatatttattttattttattttattttaagataaattttatttttgttatttaggttgaagtatagtggtataattatagtttattgtagttttaaatttttgggtttaagtgatttttttgttttagtttttagagtagttggaattatagatgggtattattatgtttggttaatttttaaattttttgtagagatgggattttgttgtgttgtttaggttggttttgaatttttggttttaagtaatttttttgttttattttttatagtagttgggtttataggtgtgagttattgtatttagatttaagtagtattttaaaagatgtataaaattattagttatcgggtaaatgtacgttaaaattataataagatgttattaaatattttttagaatgtttgtttttttttaaagaggttgttattgtttgatattggtaagaatgtgaagtagttggaattgttatttgttgtaagtgggagtatatattaatgtaaatattggaaagttgtttggtagtatttgttaaaatatatagtttataatttagatatttataattaaatattcggtgggaatgattgtatagtttttttaaaagacgtagattataatgtttatgagatttatttttatattagttaaaattgaaagtaatttaagtgtttatttataaagtggataaataaattgtgttagagttatataatggaatattatatagtaataaaaaatattttattgttatatgtaatatgggtgaattttatatatatagtgttgagtaaaaaatattatatatagaaagagaatgtttttatatttttatatattttttttgagttattaaaaaaagaaaaaagaaaaaagaaaatattttgaataatgtcgtttatatgaggtttaaaaataggtagaggttgggtgtagtggtttatgtttgtaatttcggtattttgggaagtcgaggcgggcggattacgaggttaagagatcgagattattttggttaatacggtgaaattttgtttttattaaaaatataaaaattagttgggtatggtggtatatatttgtagttttagttatttgggaggttaaggtaaaagaattgtttgaattttagaggcggaggttgtagtgaattaagataatgttattgtattttagtttggtaatagattaagattttatgttaaaaaataaataaaaaaataaataaaaataggtagagttaatttttgtttttagaagataggattagattatttgtagggattattgatcggaaggagttatatttttggaaatattttgtattttaatttgggtggttatatagatatatatatatttaaaaatttattgagttgtatatttaagattttggtattttgttgtataaaaattgaattatggttgggtgtggtggtttatgtttgtaattttagtattttgggaggttaaggtaggcggattatttgaggttaggagtttaaaattagtttggcgattatggtgaaatttcgtttttattaaaaataaaaaataaaaaaaaattagttgggtatggtggtaggtgtttgtaattttagttatttgggaggttgaggcgggagaatcgtttgaatttgggaggtaaaggttgtagtgagttgagattgtgttattgtattttagtttgggtaatagagcgagattttattttaaaaaaaaaaaaaaatgaaattttaaaaaatttatttttaattttatattttttttagttattatatattttttttttttattttatggttatagttgttaaaatttatttgtatttgatgtttatatttttttatagtttatgtatgttttaatttattttattttttttaatttattaaatagttttttttagggttttttaatgatttcggtgttataaaatttaagggatatttgtttttattttgtttgatttttgattttttttaaaattattagatatagtttatcgtatttttttttttttttttttttttgagatggagttttattttgtcgtttaggttggagtgtagtggtacgattttggtttaatgtaatttttgttttttggggtttaagtgatttttttgttttagtttttcgagtagttgggattataggtattcgttattatatttagttaattttttatttttagtagagacgaggttttattattttgattaggttggttttgagttttttagtttaggtgatttgtttatttcggttttttaaagtgttggggttataggtatgagttattatatttggttttttttttttaaaatattttgtatttacgttgattaatatggtagttaggagggatatgaggttttgtaatatttgagatgtgattagaacgattaagtaagtgaattttatttagtatttttaaaagttttttagatgattgtaatgtgtaataaatttttattaaattaatagatttattgttttagttatttatttggtatttttatttagatttataattttaatttttaaattatatattaatttgtaaaatattttagttatttttttttcgttttatagtaatatatttatttgtttatttggtatttttatttgggtattttaaatttattatgtttgtaatttgaatttacggttatttttttgtattttatttttttttagaattttttattgaagtttaggattttattatttatttagttttataagttagaaatttaatagtttatttaaggttattatatttttttgtatttatttgtatttttttataaatatttttttaatttattttttttttttttatttatttttattttaatttaagtttttattcgttttttgtttgataattgtaattgttttttggttgttttttttttttttttttttgagatagggttttattttgttatttaggttggtgtgtagtggtgcgattatagttcgttgtagtattgattttttgttgtttaagtaatttttttattttagttttttgagtagttgggattataggtgtgtgttattacgtttagttaatttttaattttttttgtaaagataggatttttttatgttgttcgggttggttttgaatttttggatttaagtaatttttttattttagttttttaatgtgttgggattataggcgtgagttattgtgtttagttttgatttttttttttgtttttatttttgttttttatagttttataaacgtaattaggatgtttttatttttaaaatgttttagtgttttttttttaaatttttttagaatattgataaatagttttattattatgtattttttgtttttattttattatttataatatttttttttttttttttattttagttttattgatttttaagttttttatattttttgtgtttatttttaattttagatttttgtatattttgttttattcgtgtggaatattgttttttttttttttggtttttttattttttaggttttagttcgttattttttttatagggaagtttttttgattaggttaggtttttttattatgtgatattatagtattatgttatttttatgtgtagcgtttataataatttgtaattatatataaataaatatttttttgaagtttaaagtaataataaatatattgtgagattattttattatttttttgtttattagattataaagtttatgagggtaggtatggtatttattttttttttttggttgttgtatttttgtatttggtatataattggtgtttaataaatatttatcgattatatgaatgaatgaaaagtttaatgtaaacgtaggattagtattaaggttggaattaagggtaggattaaggttagggttaggattacggatagtgtttgggattggaagttggttagatatagttattagggttgaggtagaattagaggttaggttagggaagattttggtaggattagatggtataagtattttggaaaattgtttgatagaatttattaaatgtattaaaggtgaatatatgtaaattttatgatttcgtaattttatttttaggaatatatttaatatagtttataatagttttaaattgggaattatttaaatattttatattagtagaataaataaattgtggtttatttatatcgtggaataaaataaagtaggaatgaattatagttatatgtagtagtgtgatggattttattaagatgatgttgaataaaagttagatataggaaagagtatgttgtatagttttatttatgtgaagtttgaggagaggtaatattaatttgtagtgttttaagttagaagtgtgatatttttgagggggtagtgattagtaggggtatggggcggggggtttttggggtgttaaaggtgttttgttttttgatttggatgacggttatttagttgtatgtgtttgtggagtttattgaggtagggattggggagtatatagagataagaggtgggaggaaaggtggtaggggggttttaggataagataggagatagggttatggtaaatttgagtgtgagggggttagttaggatttagttagggtgaagagttgaggagagatgttgaaaggtgtttagtttttttagattagaggttggggaaaggaggagggtagggtgggtgtggaaatgttgatcggtgaggagtgggggatgtgttattggtaggcggaggtgattgtgatatatatatatttttatttaatacgtatatattttttggttttttatttttaaattttttttttggattagagaaaaaggagtaattggggttattagttattatattttgttattagttagtaagagacggaaagggagttgaatagggatagagtgtttttatattaagaggttttttatttaagaaagtttaggtcgagaggtttggtatatagagagttgtttttttttgtttttttagtttttttgttagtttggagtgtagttttgggtaagagatgggttttgatcgatttttaaattttgttattttgtgtttaaggttatgttaattatttttatattttgggaatgtttgtataaagatgtgtatatatgtatatttataaatatattaatgtgtgtttatttataagtataaatatatttgtatagatatataaatttatttttaaaatttgtatttttgtaggtatatatatgggtgtttatgtatatacgtgtatatatatttaattttttttttaggttttttttatatttagttattgggtgatgtttaagaaggttgattttttgttggtttcgagggtagttttgtgagtgaaagaatttggatggtgtgagaggaataaagtaggaggttttttttagtgggaagtagcggatatatggtttttattatattttttcgtatttttggaggtttttgtgagttgtttagtgtttttttttaaataagtggattttttatttttttttgtatagtgggggaaagtagagagggtttttgtattaggaaggagtgaagagagtttattagtttttttggaaagttggtgagattggtttagaagagtagagtagtttttattgattatatatttagaggtttttttttaatttttttttttgttttgttgttattatttagttttttagttttttattttagtttttgggataattttgtttttttttcggtattgggtaagtaaagaattgggtgttttttgtgttttttttttattattttttttgttattatgtttggggtggttttttgtagtgtgtgtttggagagagatatggttttatttttttggtattttttttatagttggagggttggtagggatgggggtatttttttaaattgtgatttagttttttgggtattttgtgttgtagttaattttgatattttgtttattagggattgtataggttttaaggggtggggagaggggttggtttttataaaagatgttttatagatgggggttttggttttgtttttatgtttttttttgatttttttgttatatttttagttgaatttggtaatgagaggtgaaggtagaaggattttaggagtgagattaaaaagggaatgtgggggttttagatattgggttggaattaggtaggaaggaggtgttagggaggggtaggttggggaatttagatattttttattttggggagttaatcggtttgggaatggaaaaattaagagaaaggatttttaggttttagttgaaaatggttaggggtgtaatgagagataggaaggtagtttttggttttgtatttagtggttaggtttggagtgagtaaaggaagtttgaggaattgaggtgttgggtttttagggatttgaaggtagggttagggaaaagaggaggggttggagatgcgggaagtaggggtagggtaggtagtagttgtggtgttttcgagttgttttttagtagttttttttagttttatttttagttgtttttatgttattaaattttttttaggcgagataaggggttcgttttttttattcggggcgtgttacgtgtattggtggtggggggcgggggcggcgaggtgagggagagtgcgggtttagatagatagaggtaaggggagtttggaaggggtatagagtgaagacggagtttttgtgtttttagaggtattttttagttattttagttttgttgaatcgtgagttatgagtgtagagttttggttaagaataagttttaggattttttttgtaggttttgtgtacgttttagattcgagttttgattgttttattttagtattttttaaagagattttttagatttttttttttgtaatttttacgttgttatttagggagtttttatttggatgtttaaagaagtattttttggtattttttggagtttggagtttttagagtttgggtttagttgttttagttcgatatttgggatttcgtaagtattttttttttaaggtttagttggttattagtttagtttagttttattttttcgttagttttagtatttttagggtttaggggtttattttattaataattatttttattttggttttattatttgattttcggagtttttcggtttgtttttagttttttttagttgtttgtattttatttaaattttgatatatattgtttattttaatatatatatattattttttttttttagatatttttttatagggagtttggtttttagcgaatgtttttatgttttttgttttgaatagaagtttttgttttggaagtattgttgagagtttatttgttatatttttatttggggtatggggataggcgagaaattttttgtttttttttttgggtttttttagaattttgttttttatttgggtaatcgagtagttgtagtgtttttgtatttgttttgtttttaatttcgggagggcggcgttttagggtaggatagggaagttttttttatttgttttttgtaataggggttgagttataatcgattgtggatttcggtagcgatagtgaggagggagtttgtagcgagtaggggaggagaaggggaggattaggatgaggttagggaggggagcggagatagggtaggtttttttattttttttaggtttttttatatgttattttttttttttttttgtttttattttagtttttattttttgtttagtattattgttttattatatttttattttaatttttagtttcggttttattttttacgttttttttttatgttatttttagtttattttaatttttgtttaatttgatattttttattttttttgttattttttttttttttattatttttttatttgttgttttttttttttgattttagtggtttttttttagtttatatttttttttatggttagtttttttttttttttttttttatgttttttttttatttttttttagttattgttttagtttggatttttggatcgtattttatgtttattatttagtgttggtttttttatttttttattagtttttttttggtagtttggggtagggagtaggggtagagggtaggaggtaagaggtaatttttttttttaattgggatcgtttttgggattttaagtttttattttgttttagttttattatttttattttttcggtttatttcgttttcgagttatttttgttgtttgttttgtttagttttttttttgttattgttttttttgtatttttttattttagtaagtttttagagaaagagtaggtgaggtttgggtattggtagggtaagggtttgggtgaatattgggatatataagttttggggaggaagttggggttggggcggataaggaaggaaagtttgaaggttaggaggaaggtttagggttgaagaaagggttagagataggaggtaaatataagggtgggttatttgaatagagggtgaagtggtggaaagtagggtggggggttggtgtttgggtgttgcgggggagtaggaatagaggcggggagaggtaggggttggaggaaacggatacgttgtttttggttttaggtagaagattgatagttagaggataggggggatagggagatagatatattttatataagtttgttgggtgtttttttagttttatttttttatgtgttgttttgataaggagttgaaaaagagattttgttatagaggagaaatattttagttgagtgggaatttattatttttagttttatagtgaggattgggtttttttattttgttatagattttattattgaggtgtaatttggttaagttacgggtgaaaggtacgtgagggagtttatatgtgtttgattttgttatatgggtgacggtttaggtgtttgtatattaggttagatttttatggtggtaggtgtgtggtgtttttgggttagggcgtgtttgtattgtatgtggttgtggttagatgtttagtaagttttatgtggtcgagggtaaaggtatatatgggtttttgcgtgggtgttttcgtgtgtgttcgtgtgtttgggtgtgtgtggttgttttttttttggttttgatggggaggatgaagttagtattttggatagagttaggtttagttttttttttttgttttggtttgaagtttttagagttagtagtaggtagtagttttttaaggattttttggtaggaggtggggagttttgtagtgataggaagagggagggtttggagatagtattatatagagggtagaatatagggtatgaattttttttgatatttttagatttttgttttatggttatattttttagtgtgtgtgtgtacgcgcgtgtgtttatgttttatgttttggttttattatttaggaagaatggttaatataagtatatttggtatagagagtggttagggattttagagaagatagtaagaaggatggttttgggatgttttggaagtttattgttggggttttagagagaaatgtgggattttagatgtatataagtttataaggtatttggggaagttattggaagtttagtagatatagttttaggttttgaaattatttttgtttattatttgatttattttttggtttttaggtttatggagaagtttatgttttgtatgtttatattttgtaagaaaagtattaagttttgtatagtgtaggtgattaataaatgtaagttaatattgaaatgtgaaaggattgggagagaggagggggaaagggtaaggagtttaggcgtgaaggtagggaagtttagtggttagagttggggttggttttattgaggtgtttgggtggtggtgggtagaaaggttagtgttgtttagaattgtttataagtttcggttgttttttgtaattttagtttttgtgtttttagttttgagtttttttttttgaatgattttttaagtttttgttttgattttaggaggaaaagggatgaaagatagagaaaaggaaaggaaagatagggaggagagaaggtagatatataagagtaagggtaattgagggtaaggatttgaaggatgaagataggggaataagagatgttaggggttgcggtttaagaaagtagttttagagaggggaaagatagaaaatatttgtgtcgggttttcgtttataaaatagttttttatatagtgcgggtattaattttattttgtggttgaggaaacggaggtttatagatattaagggttttgtttaaggggttaagttagtagtggtgaaggtgggttttatttaggtgtttttatttttaagtttgtattcgtttttttttttaaataattttaggaaaggaaaggattgaagatttagggaataaatgaagtggtttttttgaagtatttgtataaagaagggtggagaatttagatttttgaaatttttttgtatttagttattgtgtagatttatttagaagaaatggtattagatggggaagggggtggttaatattttattattgagaattgggggtcgggtgaggatggggaatatagaatgtaaagatagagcgtaggatgaaagatgggagagaattaagaggttatagttgaaaagggggtaagggagttttagaaggaagggtttggatttttaaaattttttttgtttagagatatgggtgtggggagaagggaggaggaaggatatttttatttcgtgataaaagaaagttatataattgttttgttttttgttttgaggcgggtgggcgtttgtatttattagagggatttaggtcgttgtggtaattatatatttgggtttcggaatttagatgtgttgtatttagaagttatagtagaacgatgaggtaaatattaggttttttagtgttggtttttatagttgggaagaggatggagaattggtgtgggaagtaaagggagtgggggaaggaaggaggaggagaggattaaagtgggggaaaagagaggatataatggaaaggggtaagaaatgtggacgagggagtagaatgggaaatagaaagggggcggtatgagaaagggaggagataagtatagggttagtagtagtagtagatgagaagattaagaaaaataaaggaaaaagatagtgaatttaaaaatatatatatatttttaaataaggttagtacggtggtttatgtttgtaattttagtattttgggaggttaatatgggaggattgtttgaggttaggagtttaagattagtttgggtaatatagcgagattttatttttatttttaaattaaaaaaaaaatttaagatagtgaagtagtggatggggtggggaagatataaaagaagaaaaaaatagtgatgaataatggtttaaaaagaggttgtgataattgttaatgaggtagagagtaaagaaaggtaggaaagaagtttagaaagaggaagggagggatgatgaggttagggatgagagagaataaaaggtgggattttgaggaagaaatgaaggagatggtggtataaggaaagtagaatagaaagataaagtgggtatagggtaggaggggttaatgaggtgtaggagtgatagcgatttggtatgttgagtggttttgggggtgtggttagaggaatggagatttatatgggtttagaaggtagtagtttagagtttgttcggtttttattttgtattaggtatttatttatcgttttttttaattttttttgttattataattttttagttaagagaggtttgatgttttatttatattaaagtgttagttgttttttgttaattagtagaggagtaggatgttttattttagggtgatttttgagatgttagtattttaagtattttttcgaattgggggtaggaaggaggaagataatgggataacgaaatagtaatgaatttaaatgggataaaagtggaagagagaaggataatagagatggggatagaaaggggtaagggatgaggaaaaggtgtatttattatggattaggtattgaggacgtcgttttttattttgttattaattttgattaggaggtaggaatattttattttatagataagtaaattaaggtttagaatgtttaaggatatttattaacgaaaggtagggtagggaatttagtttaggtgatgtgtttttaaaatttttgtttttattgtattttttttagagatacggtggataaggtttaaggattttgggatagaaagtatagttgagaagttgggttgttttttggagggaggaaaggtttagtttttgggatttttggttttaggttgttatagttatttggtttgtttttattttaaatatagtaatgggtgagggtagtgggaggggtgtgggggttgtttggttggatatatgaggtttttttttttttttttaggtttgggtttatggtttaggtagtttttgtttagttatttgggtattgagtttaggtttagtttatattttttagttgatttaggatatttttgtagggttaggtttgaggtattgttgaataggagtagttggagggggatttttttaggttggttttagatttaattttttattttgttttgttttttttttttttaattagaatgtatagtttagttaggtatggtggtttatatttgtaattttagtattttgggaggtcgaagtgggtagtttggttaatatggtgaaattttatttttattaaaaatataaaaattagtcgggtgtggtggcgtgtatttgtagttttagttatttgagaggttgaggtagaagaattatttgaatttaagaggcggaggttgtagtgagttaagatcgcgttattgtattttagtttgggtgagagagtaagatttcgttttaaaaaaaaaaaaaaaattaaaaatataagaatgtatagttttttttgtttgttttatttttgtttttgttttttatttggatttttaagttttagttttttttagtttagggtttagaggatattttgttatatttttttttttttttaaatattattttttttttatcgagatttttattttttgggttttgagtttttggttttagtttttgttgtttgtttgagttgtttattttggatagtaagaagagggggagaatttgttcgagagtaggagatttagaggttgtttattttgaagggcgtggggttttattttttttgttgatttatattttagggatgcgtattttttagtttgttacgttatgagatatcgttgttagatatagatatattttagagttgtaggggtgggggtaaggggatgatatgcggtttgtgatttcgtatttattttattttagagttagttatgtttttagtgtttgattttttgatgttggttttggaaaagttatttttttttaaattttttattacgagttaggaaggtagttattatttttttaattttttttaagttgtttatttaataataataaaaaagaaatgtatatatataaatttgaatttttttttattttatttttttttatttttagtaattagttttaaaatgaaaaaattttttttgttttatttggggattaaatttttatttttattgttataatattagagaaataaaataaaaaatatgtagtagtttattatttattttataattgaattttatataatttttttaaataaagaagttaggattgggggtttataggaatgagaggagttttatattttgaaaagggatgagaagagaggtgaatatttttattttaaataagtgtttaatttttatatttgtttttttttttattaattgttttaagtttggggattagggaaatttgaaatagttttatttggttatttggtatttttttttttcgttttaagttagtgtgaatggtagaggttagggatgattgaggtagaggggttggtgggaggtttggtgggtttggttggttgtagagattggtaaggggttatttgtggtattgtttggggttggggatggttgttttcggagcgaggggggtattgtggaggttttgatgtgaattattttggtgtttatgattttatattcgatttgtattatttttttatagtttttcggggttttacggtttgatagggtttttgtgagaaggggagagttaaggaagaggagatggggaggtaaatagggattgtagggaggaggggaggaggttagaaaagtagaggtgagtagagagaaaaagaaagggtaatagtgaggaggtagatttatagcgggagttaaataggatggtagggatagagtttggtgtaggggtaaggagagggtaggaaaagaaaagggtattgagtgtggggttatataggagaggatattaagagaaaaaagtaagtgagagtttagtaggttttcggtttttcgtttttgtttagttatttatttaagtatttttattagggaaggatttttatttttgttttttttttaagttttttgtatggtgtttttttttttatttattttttgttgttttttatttgtgggtttagtagttttttggatgttttgtttttttttttttttttttttagtttttaggttggatttttttgttggaattgtttttatatttagtagggaaagagttattattgggggttatggtaggtattattagggatattttgggtcgggaggttttgttgtggttgatggttgggagtagtaggtggttttggggaatagatgggttaggttagaagggtggaggtaaagatgttaataagttttttagttttattttatatttttttattgaagatagattgttgggaatttggggtgatagagatggaagggtaggagaaatttatttttcggaaagagataatataaaatgtgttttttcgtcggttaattgtatttaagaatgttggttgcgaacggtttgggtggcgatatagttgtagttggtttatagaatttttaggtaggtggggaaataggatttgaggggaattaagtttaatgtttagtttttattagggaagcgggtaggatgagagaaaaagataggagatttttagtggaggagggaggtataattttattggtgatagtaatgataggtataggatagttattgggggtatagtttttgaaagtggaattttatttaataagtaagtattttattttatatttatttttttgggggtttagggggttggatggggattgttttaattggaggtgatttttttcgtggttgagatttttggaaggagaagtatttaaggatttggagagggtgaagggaaaagggaaagagataaatagtttttggaagttgatgttattttttatttaattttttattttttttaaacgattttttaaatttttatagcgagatgtttattagaaatttttagataaggtttttagtttttgtttttaagtggttttttttgaattagttattcgttttatttgttttttttgggttttttgagggattttttttcggtttttttggtggcgttggatttagttatttaattcgttagtaagtttggggaaatggaggagtttaggatttttatgttaggttaagatttttattttttttgtttatttataggagtgaggagagggtagggagtattggcgttttagtatataggttagttaggttgattgtagaaggttttgggaggtcgggggagttggatgttttagtaatgaattttatattttagggatttagtgcggttgaagtgtcggtaattagaggagaggaagagttggtttaggttttttagtagtagttttttggcgtttttagggaaggttgttaggttgttggagtgaagtaggaaggagataatatttggagattgtttagtatttttataataaagaaggcgatgacggtaagagaaagttttgggttttttttattgaaagcggggagaagattaatttatatttttaaacgagagggggttttttttttttttttttatttgaaattgggttggtttgtggggttgggttggggttttttagggttttgggaggatttttggagaggtttaattttttgaattggtttttgttttgagaattttagtaagtgttttcggggttgaggtttttttttgtttattcgaggagagatgggagttgaaggaggtttattgatgttgtggataaagaaggattgagtataatgaagaattttagttgtattaagtatttaggtaagaataaagattttgtagatggattgtttgagttgtaatttgttatataagtttgagtttgtttttgtaagatgggaataaggatggtttttatatataaaaaagatagtgtattatttagagtttagaatttagtaagtatttaatagttattatttttattagtattattattattatttattttttattggaaaaataatggagtaggaggttaggcgaggtggtttaagtttgtaattttagtattttgggaggttgaggtgggtagattgtttgagtttaggagttcgagattagtttgggtaataatagtgaaattttgtttttattaaaaaatataaaaaattagtcgggtatggtggcgtgcgtttgtagttttagttatttgggaggttgaggtaggagaattatttgaatttaggaagtagaggttgtagtgagtcgagatcgtgttattgtattttagtttgggtaatagaataaggttttatttttaagaaaaaaagataaataatggagtaggaaggggttggttagatatattatcggtgttaaggatattagaattatttgtatataagtagaaggaaatggtttgggttaaagtaggtagttaggaggttgtaacgtgggttttatttggaaggttttagtgaagtaaggaaggttttatttgataggtttaaagttgaaggtaatgaagagaaggaagattatgatgtagattatttttttgtttttagattttaatttgagttcgttgttttaaggtataaagaaggagataagaaaaaggggaattattttaaggaggttgtatttttgttggttttttagggatagattggttttattttagttagtagggtttttagtcgtcgtcggagggtagtattttttcggcggagttgttggttgttagttagtattgtttgtagtcgagtttttagtttttgtagatattttttttttttttttcgggattggtaggttgattttcggtttttgattattcgttgttgtcgttttagtagttttgtttaggtattcggaaggttaaaaaagaatgatagatgagttggtagaaggagattatgtttttaaattttaaggaatgatttatttaaagtttatatggttatttttttgtttttttgatttatttatatagttagagaggttttttttttttatttaaatacgttagggaaggggttttttttttaaatattttttgttattgttttttagaggtgggaaaggttagagtgtgggaagaattttttttatgttggtggaaattttttttttcgtaattttttttttttgttagtttatatttgtagggtttaaagtttaattttgttatattgtttatatagtttatttgatttttttttaggaggtagtttttttttttaattatggttatgatcgtagtcgtatagtatagtacgatttttttgtttttaatttatggagattaattttatttttttatttgtagtgatagtaaatttaaaggattttaaaattatttggagttgatatttatatagaaataggagtttattttgatttttagaatgatttaatgggttcgtttttttattttttttttttaggtatcgattttttttttattttatagttttttttatggtaagattttttttttttttttttattattcgttttattttttttttttttaatatttatatttattttaggcgggtaggagtttttaggtataggagcgggaacgatgtttttttttttaggtcgtggtagagagggagtcggttttttaggttggattcgaatagtattttggatgaggataattggggatattggggtaagtgagtagaggttagagggttgtgcgttgggtggggtttttgtgtttatatttatataagagtatttaaggattgggtagttttaatggttgtaagttttttgatagggttaatgtagttcgtttttttttttttttttttttttttttgagatgtagttttgttttgtcgattaggttggagtgtagtggtgcgatttcggtttattgtaagtttcgtttttcgggtttacgttatttttttgttttagtttttttagtagttggaattatagacgtacgttattacgtttggttaatttttttgtatttttagtagagacggggttttattgtgttagttaggatggtttcgattttttgattttgtgattcgtttgttttggtttgttaaagtgttgggattataggcgtgagttattgtgtttggttttttttttttaattaattaattaatttttatttttattttttggtttttttttttttttttttttttttttgagataaagtttcgttttgtcgtttaggttggagtgtagtggtatgatttcggtttattgtaattttcgttttttgggtttaagtgatttttttgttttagtttttcgaggagttgggattataggcgtttgttattattttacgttaatttttgtatttttagtagagataaggttttattacgttggttaggttggttttaaatttttgattttaggtgattcgttcgttttagttttttaaagtgttgggattatcggcgtgagttattatgttcggtttttttttttttttttagtatttgggggtggttggacgagggattgtagaaggattgtggtgttgggaggtatagttttggatggtattgggatagtggttagtattataggtttgggttgtagtggcggttttcgggtgggtagggttttgtttgaaggaaggtgagagaaaagaataagaaatgttaggattaaaggttttttattagggattttaagtgttaggagattttattatttgaggagttattaagggatgggtttatgttgatttggatagttttaagtgagggggttgggatattttataggaggtattttgaaggggatagggattttgtttttatttttaggatttttttttttataaaagtttatgtggggtattttagagatatattagttaggaagagtgtcgaggagaaggagttgaagaagggaaagtttttatatttttaggttaggaggaatttattggaaaatttggaggaaggaaggaaggtggtgtttatttggttggaggagtcggttgagagtagggaggttttagagttgacggaagaatatggagagataggttttattttggtttggatatttgtgggaggtaggatgaggtaaaagttggatattatgtaaatattgaagggttaagagggttaagatgggaggttgggtatggtggtttacgtttgtaattttagtattttgggaggttaaggcgggtagattatttgaggttaggagtttaagattagtttgattaatatggagaaatttcgtttttattaaaaatataaaattagtcgggtatggtggcgtatttttgtgttttagatatttaggaggttgaggtaggagaatcgtttgaatttgggaggtaaaggttgtagtgagttaagatcgcgttattgtattttagtttgggtaagaagagtaaaattttattttaaaaaaataaaaaagagggttaagatggggaaatgggttttttttttttgaatttgaaaataaaatttttttggttttagattataggttatttaggaggggtagttatagagttgtttatttgttggtttttcgtttcgtttttcgtttagtgttttttttttttttttagtggtttttttgattttttttatttttgttttatgttttttaaagttgtttttgtttttttgcgttttttttttttttgtttatagaatttgtttatttatatagaataggtttgagtaggggaagtggtaggggggtttttagtatttatatggtttaaatttttattttgttggatttttattttatttttgtttaatgtatttttatgttgataatcgttaagtgtgtatttttttttggttgtttatttgtattagattttgatttttaagttgtttgttggttttttttatttttatgttttattagttatttaaatttaattggttataaatgaggttttttgattgtttcgttatataagttttttttttaggtattaaatagtaaagttttagttatttttgagtttttatggtttttaataaatttgtttttatgatttgttgattattttatgaaagaaaatgttaggttttatgtcggtgaaataaaatttttttgagggttagatttagtttataggttaatagtttattattatttttggtttatatcgtttattttggtatttaattatatgattattaagattgttttttaaaattttaatttatatttttgaatagataatatagttatgatataaatttaaacgaataaaggaaaattaagttaaaaaaaaaattttggcggggtacggtggtttacgtttgtaattttagtattttgggaggtcgaggtaggtggattacgaggttaggagatcgagattattttggttaatacggtgaaatttcgtttttattaaaaaaatagaaaaattagttaggcgtggtggcggacgtttgtagttttagtaatttgggagattgagggaggagaatggtatgaatttagggggcggagtttgtagtgagtcgagattgcgttattgtattttagtttgggtagagcgagattttgttttaaaaaaaaaaaaaaaaaaaattttttttttcggttttttagttatttagattttttatatagagataattattattagaattatttaattatggttgggtatggtggtttacgtttgtaattttagtattttgggaggtcgatatttaacgtaggtggattgtttgaagttaggagtttgatattagtttgaataatatggtaaaattttgtttttattaaaaatataaaaaaatagtcggatatggtggtacgtgtttgtagttttagttattaggggggttgaggtaggataatagtttaaatttaggaaacggaggttgtagtgagtggagattacgttaatgtattttagtttgggtgatagggtaaaattttgttttaaaaaaaaaaaaaaaaaaaaaaaaagggaattatttaattatgatgtattataatttttataaaattttttaaaagtaagaattatgttttatgtttattgagggtaaagtataggtttttaaaaaatatttaagtatggaggagaatttgattttaataatattatgtaatgtaaagttattaataatttttataatttttttgttgttaatagtagtgggcgatttcggtttattgtaagtttcgtttttcgggtttattttatttttttgttttagtttttcgagtagttgagattataggtgtttgttattatgtttggttaattttttgtatttttagtagagatggcgttttattgtgttagttcgaatggttttgattttttgatttcgtgatttgttcgttttggttttttaaagtgttgggattataggtgtgaattattgtgtttggtttgttaatggtattttaatttttattttgtgtattttttttataatatgtattaatttgttagatataatttgtttgtttttttaaatttattttttatttttttttgttgtgttttttgagatttagggagaatttgaatggattgtattagcgggttttttggttggagtttagttagtgagagatggtgttaggagatttagaaggtattttgaaattaataattaatatgttaattgggtatggtggtttacgtttgtaattttagtattttgggagttaaagtgggtggattatttgaggtcgggaatttaagattagtttaatatgaaagaagttttgtttttattaaaaatataaaattagttaggcgtggtggagtatgtttgtaattttagttatttaggaggttgaggtaggagaatcgtttgaatttaggaggtagagattatagtgagttaagattatattattattgtattttagtttgggtaataagagtgaagttttataataataataataatagaattaatatgtttaacgttgaatttattattttttttgattagaaagtttttgtttttgtagtttttatttagtgaatagtaatattatttatttatagttattttagttataaatttttttgatttttatttttttttaatgtttaggaggttataatttatttattttattttatttttttttaagtttgttttttttatgatattcgaatattttatttgattaattgtataagttttttttttggtttttttgtttttggttttgtttttttgtaatttattttttattttgttattagaattatttttttaattatattatttttttgtttaattttttaaaggtttttatttatttataggataaaagttaagagttttttagtaggggttttatttggttttgtagtttttgtagttttatattattttttaaattttttttatatttattttgaagaaatgtagggtttttagatataagttaatttttatattgtttttttggttaatttttacgtgttttttaaaatttttaggaaattttttttttaggggtatattttagatttagcgttaatgtggatgaaatgtttttttttatgagtttttatggtattttttagtgattttttttttttttttagacggagttttgtttttttgtttaggatggagtgtagtggcgtgatttcggtttattgtaagtttcgtttttcgggtttatgttatttttttgttttagttttttaagtagttgggattataggttaattttttgtatttttagtagatacggggttttattattttagttaggatggttttaattttttgatttcgtgattcgtttatttcggttttttaaagtgttgggattataagtatgagttattatatttagttttatttttagtgatttttattttagaatgattatatttgtattgattggtatttgttttttttttattattaaattatagggtttgaaagttagtatggtggttaggttttgtttatttttgtatttttagtatgttgtttagtatttggtatggagtaggtgtttaataaatattttttttttataattattatattttagatatgattatattaataaatatttattaaatatatagttacgagtaaataaatttgggaatattttaaaaatagaataaataatgttaattgtagaatttagtttagtatatggtgttttagtttttttgtatgtttaaaaatgtttatgggttgggcgcgatggtttacgtttgtaattttagtattttgggaggcggaggtaggcgatttatgaggttaggagtttaagattagtttggttaatatggtgaaattttatttttattaaaaatataaaaaattagttgggcgtggtggtgggtgtttgtaattttagttatttgggaggttgagataggagaattatttgaatttgggaggtggaggttgtagtgagttgagattatattattgtattttagttcgagcgatagtgtgagattttgttttaataataataaaaatgtttataataaaatgttgggtggaggggaattatatagatatatatgttttaaattgtttataagtttttaaaaagtaagttgaatggtatgatagaatattaggaataagaaaaagagagaaaaataatatttatttttttagtattgtttttgttgtggttttttgaaatgtttttttttttttttgtttttttttttggttttttgttattttttttttttatttttttttttttgttttgttgtttgtattttttttttatttatatatatatatatatatatataatatattttttcgtagtagagttaaggattgggggtaggttgttttattatttgaggaattattagaggtggggataatattgatttggacggttttaaatgaggatgttgggttattttttaggagatatagtgggggtgttaaggattttgtttttatatggagtattttttttattttaagagtttgggtgagagttggtgtggggtagggggtagaaagaagggtaaaaaataagggagatgttgatagtaagagcgagaataaaagttttagaagtttagggtttataagttattaattatttgatattttggtttgaatggtattgattatttttttaatttgtttattttttttattttatttttgggagaattgatgaagttttatgattttaaatatggttttagagtggataatttgggtaagaatagttttagaatttttagtagttaataatttttttttttttagttttatataattttttatattaaaaagatttaagattaggcgtggtggtttatatttgtaatttaagtattttgggatgttaaggtgggaggattatttgagtttaggagtttaagtttattttgggtaatataggaagattttatttttataaataataaaaaaaattagttagatatggtggtatgtgtttgtggttttaattatttaggaggttgaggtaggaggattatttgagtttaggaggttaaggttatagtgagttgtgattttgttattatattgtagtttgggtgatagagggaggttttattttaaaaaaaagtaaaaaataaaaaataaataaataaaaaaatttttattgttagataattaaaggggatgtggaaaatgaagatattaaggaaacggtaaaggtagtggagaaggttttttatattttatatattttatgatttatagtatataaattatttaaattatttttttgttatttacgggtgaagggaatgaagtagagttttcgttatagagagtaagagggatatggtttttttatttcgttggatggttttgtggagagacgcgatgattcggagttgagggaggaggaagagtagggggaagatggtttagattttatttgaagatttggaggaaagggagttagaaattattaggaagtagagtttaagaagagtttaaaaagtatttaaggatatgtcggtggggatttttgtatcgtagtaagggagaagaaataaaaataggggattgaaggagagaggataggtatttatgtagaagcgtgaggatataggaagttacgtagtttttgggaaatagtgggaagatgagggtttttggaaatttgagggaacgataaagattattttatttgggaagatcggtaggagtttttatgggggtttagaggggttgatatttatttttacgtttagggagttgtcgttaaattaaataagggaggatataagagggtaggagtgtgagaaaggatgagaaagtaggggtgattttagatgagttatggtttgtgaatgggtttaggttttgggtttattttttatttattaagggttagagaaaggttggggatataatatcgggatattttgtttcgggtaacggaagagttgcgtttgtttttcggttattttatttaggttagaatataaggtgttgtttgtaagaaatgttgagcgtcggggggtcgttcggtggttttagtttatagatcgtatataagttttcgttttattttttattggtttcgttcggttagatttatcgttcgtttatttgaaaagtgatataattagggcgttttagttttttttttttcgatttcggaataattcgacgttttagtagggagtagagtttttttttgatttttgtattttttttaatgtataacgagttttttgtttcgtttttttttagatggcggatttcgtatttgtttagattttttttttaggttttcgtttttttttcgcgtgttttagggatagtttgttatagttttttttttttttcggtgttttattttgtagattttagtttttcgggttaagtaggttgtcggtgaagaaacgcgtcgggttagtaatttcgttgagtagtattagtttcgttattttttttttttattttttaattaggagacggtttttaaggttcgtttttttttattattaattaattagttgatttttttaaaaaagggggcgtttcggaagttttatcgattagtaagagatttgggtgttgagtacgtgaattaatagatgcggatgattgtgtaggcgggtttaatgggagtatagtagtaggaagtaatttttagatagtgttatatcgttaagcgtatgcgttaaataggttttagtgataaagcgtttgggagatgtagtatttagtattaaggtttattattttttttagttattattaagtttagtttagatagtttttatgtgttttcggagatagataagttttttaaaaggggcgtattgtgattattgttattttttttaggaagttaaaagttgagaatgggatatgggttgaaattttttttttggttttttatttttaaattttatagtatagattataatttataagtttttgttttttttaaggtttaatttttaattagttaaatattttgcgtagattttgagttagttttgtattttggttttttttttgaatgattattttttttagttttttttgggttgttcggtttttgggatttatcgttagtatttttttgaggttagtagttgttttttttaggtttttaagggtagtttgggtaattttttttcggtataaggtttttaaatggttaggttttcgttttaatattcggttatagttttgggttgttaattgaggttgttttagtaataattgataggtagttagattggtatgaaggatagttcgttttggagggttaggtgggggtaaagttaggagtagtcgaagagttcgtttatagtatcgggtagtttttttagggtttttagttcgaaatagttttgtgttttttgtacgtttttttttggttagggtttttttttcgttagtttttagtttttaggagtttcggttttgagtgaaggatgttagtgtgagtttgataggaggtttagagtgtttaggtagttgaagttttgtttttttattttgatatatggattttaagtatttttttatgagttttttttaagttttttttttttatggttttacgtttatagttagttttgtttagttttttggcggttttgattcgaaaggaaattttaaagttagtattcggtagtaggagtttagtttgggtttgtttaagttatggttacggattacgatttttttgataaagtttttatcggggtagtattagagattagaagtttgaagggtttttggtatttgattggttgatttatgagatttatgagagttttttttaagtttagtaattagttttttagttttttgagtatgttttagaatttggttggttggatttgggtttatttttagtttaagcgtttcggtaggagggtttcggggttgttgtttaatttgaataattgaattaaggttttttcgaaggttttttttttatttttgttgcggttgagaggtgtttttttttttaattgtattgattggtggcgtttttatatggatgtttagttttttttacggtgagtgaatagttttggttagaaagggatgaattaggtttaggttagtatttgaaaagaaaattaaataatgttaatagtagggtttttatttagatttttttttcgtttttttttatttttttgagatttaggtttttagttttgaaagtttttagttttgtttttttttaaaaatttgttttagttttttcgttttatttatatataatttagaattataaattttataattttttgcggttaaggtagtcgcgttaattacggatattcggtcgggttaataagtatttgcgcggttaaagtgtttggtatggtgataggaggagtcgggttattcgaattatttttttttttaaagttaaatggttattgaatgttgttttcggagttttgttttacgcggagagggtagtcggagaggggcgcggtgcgggaggcgggggtagggggcggaataattgggaaagatattgataattaattttggagttcgcgagatttcgaatttagttaaatttttggtagttaatcgggagaagggaggaatttggttagttcgtttattgaacgtgatattatttttttcgtaattatgaagttttaggttttagtaattgaattaggttagagtaatcgaattaggtagaatcgaatagaatttggcgcggtcgggttggttaggttgtttaagagttaaagtgggttaatatggtgagattttgtttttattaaaaatataaaaattagtaggttatggtggcgcgcgtttgtaattttaattattcggaaggttgaaataggagaatcgtttgaattcgggagatagacgttgtagtgagtcgagattatattattgtattttagtttgggcgatagagcgagattagagatttcgttttaaataaaaaaaaaaaaaaaaaaaaaagaaaaggtgggtcgggcgcggtggtttacgtttgtaattttagtattttgggaggttgaggttaggagtttaagattagtttggttaatatggtgaaatttcgtttttattaaaaatgtaaaaatagttcggcgtgatggcgggcgtttatattttagttatttaggaggttgaggtaggagaatggtttatttgggaagcggaggttgtagtgagtcgagatcgcgttattgtattttagttttggtaattgagattttgggaggttgaggtgggcggattacgaggttaggtgatcgagattattttggtaatatggtgaaatttcgtttttattaaaaatataaaaagttagttgggtatggtggcgtgtgtttgtaattttagttatttgggaggttgaggtgggagaatcgtttgaattagggagtcggaggttgtagtgagtcgagatggtgttattgtaatttagtttggcgatagagtaagattttcgttttaaaaataaataaataaataaataaaaagtcgggtatcgcgtacgtttgtaattttagtaatttgggaggtcgaggcggcgggggggggcggggcgggggggagggggcggggcggcggggggattatttgaggttaggggttcgagattagtttggataatatggtgaaatttcgtttttattaaaaatataaaaaattagttgggcgtggtggcgggtatttatagttttagttattcgggaggttgaggtaggagaatggtatgaattcggaaggcggagtttgcggtgagttaagatcgtgttattgcgttttagtttgggcgatagcgtaagatttcgttttaaataaataaataaataaataaaaagttaaagtgtagagaagttttggaatggagattgggggcggatgataatagagtggagaatggtagaggtcgtggtaaatgatagtggtagtagttttttatttggagattttaggtttttttatgttaattatttttatgtttagagtttatttagtatagggtgttttttaggataaaatttcgggattttttttttaatcggttttgttttttgggtgattatttgaggtttttttttatttttttttttatatttattattgttttttaagtttttttttattaagaaattttagtgttttttaaatataagtgtgtatatatattatttagggaatttgttaagttgtagattatgatttaggaagtttgttgtggggtttgtgattttgtattttaataagttggttaatgtagatgttgttggtttataaatcgtatgtttttttttttttttttttttttttagagagatggggtttgttgtgtttattaggttggttttaaatttttggttttaagttattattttattttagttttttaaagtgttgggattataggtgtgagttattatatttagtaatgaattaatgggatgagattttagaatagttttattttattgtttttttttttggttttgtgtttttttagtttattttatattttatatgtataattggtgtgatttgttttattggatgttgtaggttttttttttaatagaagatgtagagatttattgtgatttagttttgtttgtttagttatttatatagtttgggttattatagttttttaggaaagaaggattttttttttgagtattttattttggtttttttttaagtttgtttttattattgtgttttagattataaaaattatgttaggatagttaggaagggagacggttttattattagttaaagatttgtgttaaaataattttttttttggttttgtttgtttgtttttgtttttttgttttttgttttttttgagacggagtattattttgttacgtaggttggagtgtattggcgagatttcggtttattataatttttgttttttaggtttaagcgattattttgttttagttttttaagtagcggggatgataggtatttgttattatgtttggttaatttttgtatttttagtgaagatggggttttattatgttagttaggttggttttaaattttcgattagaagtgatttgtttatttcggttttttaaagtgttgggattataggcgtgagttacggcgttaaggtaggcggattattttaggttaggagtttgagattagtttggttaatatggtgaaatttcgtttttattaaaaatataaaaattagttggtgtggcgtatgtttgtagttttagttatttaggagattgaggtaggagaatcgtttgaatttgggaggcggaggttgtagtgagttgagatcgcgttattgtacggaggtcgaggcgagcggattataaggttaatatggtgaaatttcgtttttattaaaaatttaaaaattagtttggcgtggtggtatacgtttatagttttagttatttgggaggttgagatagaagaatcgtttgaatttaggaggcggaggttgtagtgagttaagattatattattgtattttagtttgggcgatatagtaagattttgttttaaaaaataaataaataaataaatataaatataaatataggtattgaaatttttaaaaaaaatttaatttaaattattatgtatgaaaatatttttttttttaaaaatatggtttattaagaggtaagtataaatttaaagttttagaagagttttttagagaagatagttatggatttgtagattttttttagttttaatttgagaaatataggattaggaagggattaataatttgtgaagatttagaaataggaaagagtggttaggcgtagtggtttatgtttgttattttagtattttgggaggttaaggtgggtggattattcgaggttaggagtttgagattagtcgggttaatatggtgaaatttcgtttttattaaaaatataaaaattaggttggtgtggaggtgtgtgtttgtagttttagttatttaggaggttgaggtaggagaatcgtttgaattcgggaggtagaggttgtagtgagtcgagattatattattgtattttagtttggcgataaagtcgttttatttaattttttttttttttttgaggtagaaaggaatttgagaaattttgttttaaaataataatttgtaaaaaaagaaataagaaagagtataggtttttttttaaagtgtagatattatatgtttgttgattgatttatattattttttttaagtttaattgtgttagagtttagttttttggaggtagttattaaggaattaagacgaaagagagttataaattaggaagattatatttttaagtttggttagagaataagatatttgagaaagatatataaagaggatgataagtgaaatttgtttatttgttgggatagatgtttggattggaaagtggggaaatagtaatgtttttttttttttttttttttttaaagatttgagaatgaaatggaagatgagtaggtatgagaggaagagatgaaaaggaatttttttttttaagggattggatttagtttttttttgttattataaattgttttttgttttttttttttttttggtgttgtagggattaatattattaatatttttagaaatcgtgtgaatgtaaatgggatatatttatttcgttttgttatatagaaatttttcgaaaagtgagattttgggttaagaaggttaaagagggttaggtgtagtggtttacgtttgtaattttagtattttgggaggttaaggcgggtagattatatgaggttaggagttcgagattagtttggttaatattgtaaaattttatttttattaataaaatataaaaattagttaggtgtggtagcgggcgtttgtaattttagttatttgggaggttgaggtaggagaatcgtttgaatttgggaggtagaggttgtagtgagttaggattatattattgtattttaatttgggtaatagtgtgaaatttcgttttaaaaaaaaaaaaaaaggttaaagagatatttaggagaatgtaagaatttgggaggagggtaataattttgttatgattgtagaatgttaattttattttggaataattttttatttttttaagtgaagaaaattggattgagggaaattatatttgataagtttttggggatttatttgtaaatatatttatattttatttggagttatttttttttttttttttttttgggttttttttttttaagatggtttagagaaattggttatattttgttattttttttgttttattttagaagggtattgtttgtttttatttaagatttaatttgaagtttgggtaatatagagattttgtttttataaaataaaaattagttaggtagggtggtgtatttgtagttttagttatttaggaggttaaggcggaaggattatttgagtttaggagttgagattgtagtgagttaggattatattattgtattttagtttgggtaatagagtgagattttgttttttaaaaaaaaaaaaaaaaaaaaaaaaaagagttaatttgaggtagaatttaaggagaggtttaggagttggtttgaggtagtttgttagttagtggttgttttattttgtttttgtatatagagtatatgatgtttgttttttaaatggatgaagtagaattttttttttatttatttagtagtttttattgaatatttagaatttgttagtgaaatatggagataaatacggagaatttttattagtaatttaatgagagtgaaaagttagattagttaatgttttagatgtaaaggaaaaagtgataagtggtaggggagttatttttaattggggttgatttgaaaatattttatggatggttttagagagttgagatttgaaagagggtcgtaaatttgatatgtagaaatggaagagattgtcgggtacggtggtttatgtttgtaattttagtattttgggaggttgaggcgggtggattataaggttaagagatcgagattattttggttaatatggtgaaatttcgtttttattaaaaatataaaaattatttgggcgtggtcgtatgtgtttgtagttttagttatttgggaggttgaggtaggagaatcgtttgaatttagggggcggaggttgtagtgagttaagatggcgttattatattttagtatgacgttagcgtaagattttattttaaaaaataaaataaaataaaataaaatagaaaaaaagaaaaagaaaaagaaatggaagagatttattgtaggtggaagaagtagtataaggtaggagaagtaaggaaagttatttaatatttaggattatttttttttagtttgtgagttttagtttttttaggttattttaatatttttttgtgttgttttgttattaggtattgagttggttggaagtttttatatttttatatttttttgcgttttatatttattatatggaattatatgttgtatttatttttttttatttattatttgtatgagagataaaaattttagttttttaaaagttaaataaatttttttttttgtttagttttggtggtttttgtggtttttagttttgttgggatttgtgttaaaatcgttttttttttttttttggttttaaagtattttgttgtgttttttttatagttagggtttttaagtaggagggaggtagtttttttggtagtgaagtgtttaatgataatagttttattttattaaacgttggttatgtattatgatcgtaatatttagtattgttttaaatgttttgtatatattagttattttttttttatataattttatgaattatttatttatttagtgatttaaagaattttgtttgtttggttggttggtttttgtttttgttgttgttttgagatgacgtttcgttttgttatttaggttggagtgtagtagcgtgatttcggtttattgtaatttacgttttttgggtttaagtgatttttttgttttagttttttgagtagttgggattataggtgtgtatttttacgttcggttaatttttgtattttttttagtagggatagggttttattatgttggttaggttggtttcggatttgtgattttacgattcgtttattttagttttttaaagtgttgggattataggcgtgagttattgcgtttagttaagaaatttttattgagggttttttttgtattaagtattgtgttatatgttgggaataaggtagtggaaaaagttttggatttttggtaatttatattgaattgaagatgatagacgataaaaaaattaataaaatttaatataatgttaggtattaataagtgttatgaatattatgaagtagggtgaggggtaagggaatgggatagaaagtgtttttaggtatgtatggtgttatatttattgatgatgatgattattattatttatagagttttgttttgttgtttaagttggagtgtagtagtgtggttatggtttatcgtagttttgattttttgggtttaagtgatttttttatcgtagttttatgagtagttgggattgtaggtttatgttattatgtttggttaatttttttttttttttttagagacgaggttttattatgttgtttgggttggttttaatttttaggttttaagtaatttttttgtttttgttttttaaagtgttgagattataagtaagagttattgtgtttggttatggtattatatttaattaagtgatgagggaaagtttttttgtggaggtgatgtttgtgtagatataaatgatataaaggagtagttatgtaagtatttggagggagagtgtttaggaaaagaaaaagagagtgtaaaggttttgaggtagaaaggaattggatttttatgttaaatttagaaaggaggttagagtgagtggagtagagtgagtaagagaaagagtggtaagggatgaagatagagaggtggggagaaataaggttaggtaggttttataggttatgggaaggattttttattttgttttatatgtgattaggaggtattagagggttttgagtaggtaaatgatattatttggtaattttaaagattattttggtttttttatagagggtaggttatattagtaaaaaatagaagtagaaaatttaattaagggataaaggaagggataatggaattatgggagtttggattagggtagaggagagggttaagaatagagtttagaggttttttaatatttaaaggtttggaaaaggaataggagttgttagtgaagattgagaaggagtagtaaataaggaattagggaatgtttttttttttttttgtttttgagatagtttgttgtttaggttggagtgtagtggggttattatggtttattgtattttcgattttttaggtttaagtgatttttttattttatttttttaaatagttgggattataggtgtgtgttattatgtttagataattttttaattttttgtagagatggggattttttatgttgtttaggttggttttaaatttttgaatttaagtgatttatttgttttagttttttaaagtgttgggattatagatatgaattattgtatttggtaggataatttttttttttttttttttttttttttttttttataattttaaatttaagtagtatatttggttggttgttatatgattatattgtattttggtggggattgggtttttagtggtgtatttgttatttaaatagtgaatattgtatttaataggtaaatttttttttttttttgagatggagttttattttgttgtttaggttggagtgtagtggcgttatttttgtttattgtaatttttttttcgttttaggtttaagtgatttttttgttttagttttttgagtagttgtaattataggtttacgttattatgttaggttaatttttatgtttttagtagagacggggttttgtcgtgttggttaggttggtttcgaatttttgattttaggtgatttgttcgtttttgttttttaaagtgttgggattataggcgtgagttattgtgttcgattttttttttttttttttttttttcgtgatggggttttattttgtaatttaggttggagtgtagtggtgtgattttagtttattgtaatttttgtttttttggtttaagtgatttttttattttagatttttaagtagttgggattataggtatatattattatgtttagttaattttttgtgtttttggtagagattaggtttgtttcgaattgttgagttcgagtgatttatttgtttcggttttttaaagtgttgggattataggtatgagttgttatatttagttaaatatttggttttttatgtttgagttagtttatttaggataatggtttttagttttatttacgttgttgtaaaggatatgattttattttttttttttttttttttttgagatggagttttttttttgtcgtttaggttggaatgtaatggtatgattttggtttattgtaattttcgttttttaggtttaagcgatttttttgttttagttttttgagtagttgggattataggtacgtgttattatgtttggttaattttgatatttttagtagagacggggttttattatattggttaggttggttttaaatttttgattttaggtgatttgtttatttcggttttttaaagtggtgggataataggcgtgagttatcgcgatcggttaattttattttttattatggttgtgaaataattatttattgtgttttttagttgtaaggagtttaatagtatgtttggtcgttgtttattagacgttaggagtatttttttagttgtgataattgaaataattttagatattgttaaatgtttttgggggtgggatgggaggattatttatttttgaaaattattggttaagatgttttataggagatatttggtaagataatgtataggttagatttttatgataaagaattatttgatttaaaatgttaataatttttgaaattgagaaattttagtttagattttagttgagaatttatttttggaattaagttaggtttggttgtgttttttcgtggtttaataacgagaagtagataaattaggaaagaagggaatttgttgttgttatcggatatagggaaagggtcggagataattttattagattaatttaaagtgttataatttttttttttttttttttttgagacggagtttcgttttgtcgttaggttagagtgtagtggtgcgattttggtttattataattttcgatttttgggtttaaatgatttttttgttttaggttttcgagtagttgggattatagacgcgtgttattacgtttagttaatttttgtatttttagtagagatagggttttattatgttggttaggatggtttcgattttttgattttgtgatttatttatttcggttttttaaagtgttagaattataggtgtgagttattatattcggttagtgttattatttttttagtgtttatataggtttaggttatatgtttatatgtagtatggtatttattaaagtttattagtaattaattttgttttaattagagggttagaggtaaaaaaatttttgttaagtttgattaagttgtgagggttttagtatttttaaggtttgtttattgtggtattagagtgattatttttattttattttttttatagtttggtgcggagagttgttttagattgtttagtgaatttatttaaatagttgtttttgttattttgatttgttttagatatcgtcgattcgagacgagttttggtattaggaatgtaaggttgtttttgttattttgatttgttttagtaagggagaagtttatgtaaggtttttatttattatgtgttttatttttagttttgatgtttgtatattaatttttttaggtttaattatttgtttaatgttaaggtaatgttgtggaaatttgtttgtgtaattggggtgttatgtaggtttgtttgtgtgattgttagggagaattggtttgttataaattgatttttgattattgggtttagaaatttggaggttatttgtgattttgatatgtggtttaagtaaagtggtggggatgagagtttgattgagagaaatttaagagtgaatgagaggtgagaaagtagaggtagtgagaagttttgttaagtggagagagaagtggaatattgagggagtgagttgggttagggaagagtttttaaatttaaaaataaatgtattattttatatatataaaattataatttatatgtataaatatatatgtattataaagaataattttgtgaatattaggtagtttatgaagtaaaatttttttattagggtaaggtggtttatatttgtaattttagtattttgggaggttgaggtgggcggattatttgaggttaggagttggagattagtttggttaatatggtgaaattttgtttttattaaaatattagttaggtgtggtggtgcgtgtttataattttagttatttgggaggttgaggtaggagaatcgtttgaattcgggaggcggaggttgtagtgagttgagatcgtgttattgtattttagtttgggtgatagagggagattttattttaaaaaaaaaaaaaaaaaaaaaagaaagtaaaaataagaggtaaaattttttttagtatagttaaggttttttgaatttttttttttagattgtttttttgttaaagggtaagtattattttttgaatgttgtgtttttattatttaggtgagtagcgaaatagtttttttttttttttttagagatgaagtataattttatagtatgtttgtataatgatgggagtgttgtagtatagaggggtaaattgattaagtgagagagagagagataggggataattttaggaataatatttttgagtaggtgagagggaataggatttcggggtatagatgaggtggtaggtgggtgtatgttagtttttttgcggtagagttgtaggtagattggtgaatttggggtgggaatatgaggaagtttttttttgaaagtttttgtttttttattgaaataggaagaaaagttattattttgtgaagttgtggttttagatttggggaatgtgaattgagtagggaaaggcgagttggtatgttatattgagggttcgtaggaagtaagattagttagtatgattgtgtgtttttttttagttgttgaatgtaggtgtggagtaggtagagtgggatttgattagggataaaatgtgttagaggaaggggggttaggagtatagggtgagggttgagaggcgattatcgtgttgaattttggaatttaaattgggtaatgaggaaagtgaagaattgagattaaataatgaaaagtaagttagtggatgggaggtttagatggggttgaagaatttttgggataggggtattggggagtaatatgaaaagattgaggatgagattttagaagggtagtaggtattggtggtaattaagttgaaggtatgatatagggcgagagggaagtagggagaaataaattattgtaagagaagggtagggtgttagagaatttgtatgaatattgaaaataaaaataataaaacggggttaggtattgtagtttatgtttataatttcggtattttgggaggttgaggtaggtagattgtgtgaatttaggagttcgagattgttttgggtaatatagtgtgattttatttttattaaatattaaaggttagaggttaggcgtagtggtttatgtttgtaattttagtattttggaaggtcgaggcgggtggattacgaggttaagagtttgagattagtttgattaatatggtgaaattttatttttattaaaaatataaaaaattagtcgggtatggtggtatacgtcggtaattcgagttatttaggaggttgaggtaggagaatcgtttgaatttgggaggtagaggttgtagtgagttgagatggtattattgtattttagtttgggtaataagagtaaaatttcgtttaaaaaaaataaaaataaacgaataaaaaaataggttaggggcggtgttttaagtttgtaattttagtattttgggagggtgaggagggcggattattaggttaggagattgagattattttggttaatacggtgaaatttcgtttttattaaaaatataaaaataaaattaattgggtatggtggcgggtgtttgtagttttagttatttgggaggttgaggtgggaggcgggagaatggtatgaattcgggaggtagagtttgtagtgagtcgagatcgtattattgtattttaggttaggcgatagggtgagattttgttttaaaaaaaaaaaaaaaaaaatttaaaatttattcgggcgtggtggtaggcgtttgtaattttagttatttagaggttgaggtagagaattgtttgaatttaggaggtaaggttgtagtgagttgagattgtgttattgtattttagtttgggcgatagagttagattttattttaaaaaaaaaaaataaaataaaaataaaaaaaattagttgggaggattatttgagatcgggagatcgaagtttagtgagttatgattttgttgttgtattttagtttgggtgatagagcgagattttgttttagaaaaaaaagaaaaaagaaaaagaggttgggttcggtggtttacgtgtgtaattttagtattttgggaggtcgaggtaggtagataatttaagattaggagtttaagattagtttggttaatatggtgaaattttgtttttagtaaaaatataaaaattagttgggcgtggtggtagatgtttgtaattatatttattaaggttgaggtaggagaatttattgaatttaggaggcggaggttgtagtgagacgagattgcgttattgtattttagtttgggcgagaagagtaaaattttattttaaaaataaataaataaataataaaaagaagaaaatgaaatgagcggtggaagtagagtgattaggtgttgaattttttattgtagagggggaatgatgatttagaatttaattatggtttttttttatttgtatgagagtatttatatagatgttatgggagggtagagttttttttagaggatggagtttttgttagtagaggtgttatagttaagggtattatttgtagagggaggtgagttagataggaagaggattatattgtaattttttttttttttgagacggagtttcgttttgttgtttaggttggagtgtagtggtataatttcggtttattgtaagttttgttttcgggatttatattatttttttgttttagttttttaagtggttgggattataggtgtttgttattatatttagttaattttttgtatttttagtggaaatggggttttatcgtgttagttaggatggttttgattttttgatttcgtgattcgtttatttcggttttttaaagtgttaggattataggagtgagttatcgcgttcggttatatattgtaatattttatttttttatgagggaggagtttgggtgaggttaagagatttgagattaagaaataaatatttttaaggaaaagtaaaagaaagttaagttattttttatttatttttttttttgtttgattttttttaatttaattgagtttaaagattggtagaggaggttttatttgatgaggatttgaaaaatagagataagttagatttgatttttgtttttaagtagtttataaggtaaattgtgtatgttaagatattaggtgggaagagatgagaaaatatgtagataatatgaattttagatttagatattttttttttaaagaaaattgttcgggttgaagttattttttggtttttttattttttttgggtggtttttaaagtgtttgtaaatttgtgatttttaattttggttgttttttggaattatttggttatgttttaaatattgatgttagagttttatttttagagatttttttttgtttgttttgagatagggttttattttgttgtttaggttggagtatcgtgttttgattattgaagtttttgttttttaggtttaagtaattttttcgttttatttttttaagtagttaagattataggtgagttatggggttcggttaaattttttttttttttttttttttgagattgagtgtttttttgttatttaggttggagtgtagtggtgtaatttgggtttattgtaattttcgttttttaggtttaagcgatttttttgttttagttttttgagtagttgggattataggtatgtgttattatattcggttgatttttgtagttttagtggagacggggttttattacgttggttaggttggttttgaacgtttgattttaggtgatttatttatttcggttttttaaagtgttgagattatatgtgtgagttatcgcgttcggtttaggttaattttttttttttttttttttttgagacggagtttcgttttgttgtttaggttggagtgtatggtacgatttcggtttattgtaagttttatttttcgggtttatgtcgtttttttgttttagttttttgagtagttgggattataggtatttattattatatttagttaatttttttgtatttttagtagagacgcggttttattatgttagttaggatggtttcgatttggtttaggttagtttttaaatttttttgtagagatggggttttattatattgtttaggttagtttcgaatttttgggtttaaacgatttttttgtttcgattttttagagtgttgagattataggtgtgagttattggtattgagtttagagattttgatttaattgttttaggatgcgatatgggtttttagattttttagtgttttttagtggattttaatgtgtaatttggggtaagaatcgttgttttaaggaatgtttgaagttttgtttggaaatttattgttttaatttaatttagaggaaagagagatatttttttgttatagtgagggatgaattgattcggattttgaaagatattgtaaataaaatttgattaagtagagaggtagatgttaagagggggagaatattatgagtaagagtttagatgtggtttaaagtttttgaaatttgtgataagttgtaaataatttggtttataataggtagagatttgggaaggaggtttaagatttgggaatagttgggtaaatatttggaggtgggaatgatgagtaatttagtatggttagaaattagaatgaatagagaagttggatgattttaaattatggaaggtgttaaaggttagattaaaattttgtaaataattgagtaggtaatagggaattttgaagggtttttgagtagtggagttatgaaagtgtgtttagggaggttgatttgataatagtgtggagggagatttgaggtagggagaagtaggaagtagggagatttgttgggaaagttgatgtaataattttaatgaggtaatttttttagtaagggttggggaaaaattatagatttaaaagatattgtggtggtagaattgattaggtttgagagtatattaaaaataaggtaggagggagagggaggaggcggtaaatttttagataaggaagagtgattgggaaaatggtttattaatagagatagggaagtaggttttttgtggtattttattagtttgttttggaatgtgttgattttagaggattagtaagtattttttatgtggttatgatttttaggtattggaaaaaacgtttgtatgtaaaatataggttggaaaagtatttgattagttgagttgagtgaatgagttttttaaaggaaagttttagagaaggaaaaaaaattagagatggatatttaggggaagggaggagaaaaagtaaggagggaaggtagaggcggaatggttagaggtttgtgtgtgtgtcgggggaagggaggtaatacgtttttgaatttgggtatgtggggaatttagggttaagggataaatatgggagggtttagagaggtagaatattgtgaaaatgttattgatttgggatttgggtaattggttgttatttgagagggaggttttaggagaatagggtgtggatgtatattttaataagttaagaaatagtgggtatgaaaaaaagatagatatagatatatttttgatagtaatatttcgtatttttttgtttttttttttttgagatggagtttcgtttttgttgtttaggttggagtgtaatgatttgattttggtttattgtaattttcgttttttaagtttaagcgatttttttgttttagttttttaagtagttgggattgtaggtgttcgttattatgttcggttaatttattatttttagtatagatggggttttattatgttggttaggttggtttcgaatttttgattttaagtgattcgtttgttttggttttttaaagtgttggaattataggtgttagttatcgtgtttagtcgtgaattttgttttttaagaagtttggtaaggtaggtatattaaatgcgaaatatttaagggcgaatttatgatatttatattttattttattttttttttatattttttattatattttttattttagtgtatggttttttttttagattgtaagttttatgaggttaggggttatatttgttgtttgggtggatgttttattagtatttagtatggagtttgtatgttgtataaatgtataaattaggttaggattttgttttgtgggtgtataattaaagatttaagtttattgttggtagtattttttaattattattttttttagaaaagaggtttattggttgattttaggataggagagggtaattagttttagggagatttgagaggttattgattttttttttgggtttttatagtaatttgttttttttgttttttttatattttttatagtttagtatgtggggttttaatttaagttatttgttattttttagtttatagttaggaatagttatgggtagttggtatttttttttggtttttattattttatttttgattagtttttttattatggtttgttttttttgtttttttgtttttttggagttttggggatagtagggaatggaaaaggggtattggggaaataaagttttattaagaaaataaagttttattgagaatggattttaaggttttttttggtggatttttagggagttttttttcgttttttatatttacgtgtttttttggcgatttgggaatttgtgttttttacgttagtttttgtcgggttttttttttttttttttggaagaggagatgaagggaagtgaaaggcggaattaaaagtggggagggtttttgcggggtcgtagtttttggaattgcgggcgataaattaattaagtttttttaatattgttttttagaagtttatatatatttatatatagattagaataaggcggggtcgtcgaggggagcggggagcggggatttgggaggtttatagtttggatttttttttgttcggttgtttaggggttgggatgggtggaagggagtatttatagagcgtttataggtaggttttttattttagggagaagggttttatattaggaattttttaaatgtttttaaaaaaagtaaaaggaaaggttttgggattagtaagaaaataggtagatatttgggtggaggagggataaaaatgtatttgtaaaaaataggagtgtgggggttttattattttagggttcggtttttttgtcggaagaaagggaggggtttgttcgtttgtgggcgaggtttggagttataaatttaattattggattgaattatttcgcggagaagaaaagaaggcggagtttgtcgatttggaggcggggttttgttagagttggggcggtgtttatagaggaggcggggttttagggattaaatcgaggttgttcggttgggggcgttatattttgagggtgagggggtttggagcgattgagggttcggcgtttggtcgggatttcggaaagcggcgtttttgggggtgtgggttttggaggggtttttgaggaattggatttcgagtttgttcgtaaggcgagacgtttcgtggaggcggagtttacgatgtatttaagtttgacggttttagaaacgggtgtgtagggcgtttattgggttcgcggtatgattgtagaaagagtttgggagatcgaggggcgtagagtggggtcggattaggggcgtttttagggattttagtagttttcgtggtgttgcgcggcgatgatgatgattacggtgaggatggtatagagtattatggtcgcgatgtttacggttagggagatgaaggagaagtttcgggtttcgcgtgaagcgatttcggtcgatattatgttttcgcgggttaaggtcgtgcgtatttacggaggaggggtgggggaaggaggttaaagagttgcggtttcgttcgaacgttttagtttttttttaagatggtttttagaacgtttagaattttttgttttcgtttttaaatcgagtatgtttttgttttttatttgtacggttttgaagatggtaatgatgttagtaggttagaagtaatagatggtggttagtatcgcgatgggtatgtagtcgtgtggcgggcgtttcggttttagtagggttagttttgggttttggggcggcggggggagagtggaggttatttttgtttttttcggggtttcgtttgtatatggttgtggaaggaaatttggggggtaggggtattattttgatttttttttagtttattagcgttgggcggttggtagagtggttttaaaagtataatttttatttatggttttttaaaataaagtatttattatttttttaggatatttataaattttatttaagtttttttttttttttttttgttttattaattattatatttttgggttttttatattttttttcgtaaggtatggttttattggggttgttttggttttaggttagatttttttttttttttttagatatttattaggttttttttatttttttagttttaggttttttttatattttttttggtttttagtttttatttttttcgtttttcgttaggcggttttttatttttagattttttttgaatttttaggtttcgattttttttttaggttttgattttgggtattagtagatttttattttcgtgtttttttttagttttttttgttttaggtttttttttttttagggtttgtttcgggaatattatttgttttttgtttttgtttttttattttattagtttttagcgtatttttaattttaagttttgtatcgcgttttttttttttttatgtttttgtttgttcggtatttatcgtgtttatcgggtagatcggtacgtaagtagtgtaaggttgtagttgtagggggtattcgggcgttacgtagttttttagcggtagcgtgtttatagttttcgcgtgcgtgggtattacgaagttaggggtttgggtagtttgggttggcgtcggcgggggcggggcggcggtagcgggcggcggcgggggaagtgggttttcgaagcgagttttttgtaggtaagggtcgggtggtatgcggggtaaggtagcgtagtcgggtgggggtgtttcggtagtagggtcgggaggggcgtggtgggggggtttcggtagcgtggtagaggaggagggatcgcgttgagcggtggtcgcggaagaggttaggttttttgtttttaagcgcgggagggtggcggtgttagattgatggtagtggtggtggtggtgatggtgtgaggaaggggttgtttgtggcggtggggttgggggttcggttggaggttgaggggtattgtagggcggcggagaagtgtgagggattgagtttgggagttttgggggaggtgagtggaggagagtataagaggaaagatgatatagtgatgagttgaggagggggtaaggggaaatatagtcggttagggatggagaaagataatgggagagatatatagagagagacgggtgagaaattatttttaatttgaggggtaagagaggggttgtatttaggttatttgttttttttttttttttttttaatttagttttgaggttataattttggtttgttttttttttgttttttttattattatgtatttagtttttatttgtagatttaatttttttttttttgttatagttgtttttgggttggtttattcgagttagttttgtgtgtgcgtatgcgtagatatgtaattttgtgttaatatgtgtttaatttaatagttgtataaatatatgtgggatgatatgtgttttattttgttgtttttttagtggggggaggagtgttttagtttttgtgagaatttcgggattttttttagggtagattaagaagagttttttggattttgtttttttgataatttttatttggttatgtttttatatttttttataggatgtttttatgttagttagtgattgtttatttgttatttttaatgatgttatttttgtaaaatttggttgtattttttttatttttttaatttatttttttgattatgttgttggtaaggggtagaggttgttattggaaagaggaaaggaagagaaagggggagatagaaagaggagggggattgggggagtgttgagagttggagagaaggggaatgaaatagaattatagttgaggaggggtaagggagggggttggggtaagggggacggagagtttggagatagtggagggggtgggaggttttgttattgtttttatttgatttttcggatgatatgtttgcggtttcgttgggatagggtttttgtagtcggagtgggggttttcggtcggtgttggagtttgggtgttggatggcgtagcggtagtagcgtagagatggagagatgaaggtagcggcggggggggggggcggggggggcgggcggagggagagcggggagggggggagtttaaagggatcgaggcgagggagggggagcgttttagatgttttttattcggtttttttttgttttcggattattttttttttttttttatttcggtatttaagtttttagtttgggtttttttggagttgttatggaaatacggaggttagattaggcgaggcgggtgggattaaggaaaggaaggaaggagaattttttggagttttttttattaagatttagtgattgtattgtgggaggaagtgaataggtttttagtggagttaataatttaggtgtttttagaggtaggtcgttttttttttttagttttttgtaaggtgttagggtttttttttaaatttttggttttagtttttttttttttagaagagataaatatttgtgtgtgagagagaattgtgtagagtttagaattgcgatggtttgaaaagtttttagggtttggtgaatttattaatttagtagtaaagagggaggtttaggtttgtaaattagggggagttgggttttggagggaaaagggagagagagtttgggcggtgtgtatatatatttttttcgtttaggattaaggagttgaagtttttttggagggggtagggggtatgatttaattgtttatttttggtagttttgttggtaatgtgtgtttgtttttttattttttttttgtttttgaggttgtttagagtttttgggttggttaatgtttagatttattttttaaatttttttatttttatttattattttttattaagacgtatttttagtttttgagtcgatttgtagtatagcgttattagtttttttatttgtttattgtattttgggagcgcgtgggtgggtgaagggagcgaggataggaagtttatggagatttatattagtttttttttttttttaaataaaaatatagttagataattattattttttttttacgtttttttagtttttatttggggtagtcgttttttcggttgcgttttttttcgtttatgttttagtagagattatagagtagtatagaggttttcgttgaaattagttttaggttttatagagttagattacggttttatattagtcgttttggttatttaggcgttcgcgtgagcgtttaattttttatcgttattttatcgttattttatattattttgagcgtaaaaatgttttgattgagataaatttagattaagtaatgattttgtaaatagagagaggggtttagatatgttgagaaatttttatttttagagaaacgtttttaaatgttaagtaaaagttttagtaagtaaaagttttgaggtattagggtgtcggttaggggttataggcggagaggtggggcgtttgggggtttcggtagggagttatttatagataatttagatagttagattttgggggtcgtttaggttgaaagattggtcgaaattacgcgggtatgagttagcgtatttttacgcgtttttcgttttttgagggtgggtcgtttatagggaggggagtagagtagggtaggagaaattgggttaggttgtatttagtttaaggggtttcgaggattttttgcgtttttggagataagggtattatacgtattttagaatgaagagttgtaagtcgttgatttggggcggattggagggtggggtggggtgggtgttgaggggtacgttcgggttggtattagttttttaggttattttgttatttatttagtatacggtaaaatgtagaggattatttttttttggttcgttttttggtcgttttttggggaatgtaaatttcgtgttttgttgcggagttagacgtttgtattgggaagtggggagaattaaggcggggaaatcggattttcgggtcgttgggggtaacgaagtttggagaggttttttttttatttttagaatatgtttgttgtttttttttttttttattggtttaaatggatcgtttcgtttgttttttttttagtatttagggcgtaatggaatattttattgttttttttgttttgggtttgtgttgcggggaacgttcgcgcggttgttagagaaagtttcggacgtgacggatttgcgcgattttaagtagttcgttttttttttttttattcgttatttttttgcgttttttttttttattttttttttcgttatcgtgggttttagatttgggataagtaaatagcgggtggagcgaggtttacggatttaggttaggtgggagtttgtattttttaaggggtttgggttgttgtttacgggtattaaagaatttcgcgttgtttatggttgaggcgatgtattaggaagattttggatttagagaataagtttttcgaacgttgagttggaggcgggatttcgggtgcgcgttggtgcgttaacgtggtgggggggtgtgtttgtagggagagggttggagtaagttaaaagtaggttattttgtgatacggatttggtgtgggagcgagaggaggtggtttgattgtcgggcgtttgtttcgagggaggagggtgttgttattttttttatatgtttttattattttttttttaggcgggagtatgttggggttttgggggtagcggtttttcgcggcgtgggttttgtttttgttgttttttttgtcgttgttgttgtttgtagttttcgcgttttatcgcgcgttttataagtcggttatcgtggtgtatgggtttttcgatagttcgtatagttttcgttatttgttggaatatattaatgaggtttggtaggggatatttgggtgtagggcgttagaggcgtttattgtggtaggggagggagagcggggaattgaaagttatttttttgggtttgtttagttttttagggagttggtgttggcgtgggggagagttgggggacgggatttttggttttagtagggtataatagatttgtggacgcgggttagggggtggcgtgtgggagttttttagtttattttcggtggttgtattgttttttttttatagatatatttcgggattgtggtgatagtgttcgattttttcgatgggagagagagtttgcgatttttgtgggaataggtgtaagggtttcgagaggttgtggtttttattatggtaaaggttttttaaggggtgtattttatttgttattcgtagggtaggcgatttttttgtttttaatttttaagttttatttgaggtttgatttttatttgagggatattttttagcgtttttttttttgaattatattgttttaggtataattttggtatttgagttttttttttttgattttttttagtatttgggttttatttttgttttgaatgggagggaggttttttatattgttgtttttttgttttttgttatttatggtttttggatataagggttaatggggtaggtaaaaatattttagaattagaggtaggaggtttagtatttaattcgggtttagttatttatatgatgtgtgattttttggtatagggtgtgtttgttttttgtaagttttagttttttttgtgtatagtgtatgtttgtgtgtgtttttgtgtgtgtgtgtgtggtgggggtggggggtgttgttggttttgttgtttttaagtgtttgtttaatgtggtgttttgtttatagggggttttgtgtgtcgggttttgttttttgttatggatgattataacgtggatttttttattttttttttttttttatagatgggatagtatggaggtgagtgggtattagattttatagaatgttttgagttttgggggaatagaggtttatggttatttagtattgttattcgtttgttagatacggattatttgaagtggttgttttttatttttatgcggtttaatttttatcggatttgttatagtttttggggttaggaattttttatttgtaattattggtatggtgagtggggatgttgaattggggtttttatggattaggttagttgtttttatttttgttataattaatagtagtgatgataataaagataatttatatttattgagttatttgaataggttttgtttagaattttttttttttttgagacggagttttgttttgttgtttaggttggagtgtagtgtattatttcggtttattgtaattttcgttttttaggtttaagtgatttttttgttttagtttttttagtagttgggattataggtaggcgttattatgttcggttaagttttgtattttaagtagagatggagtttcgttatgttggttaggttggtttcgaatttttgattttaggtgatttattcgtttcggttttttaaagtgttgggattataggtgtgaattattgtatttggtttagaatgttttaagtgtgttattttattgttttagaaggtttagtttgatgtgggagttagtaaattttgtttataaagggttagagagtaaatatttttgattttgtaggatatatagtttgttttataattttttaattttgttgttgtagtgtgaaagtagttatgtattatatgtgaatgaatgtgtttgtgttttagtaaaattttatttataaaaataagtagtaggttggatttggttttttggttatagtttgttaatttttagattagattatggggttagaatatttgggtttgaattttgattttattgggtgtttttgggtaagttatttaattattttgttatttagttttttttatttgtaaaatattatagtatgtattttattaggtggttgtaaggattaaataaataaatgaatgtaatgtattttgaatagtatttggtttatatagtagatattagatagaagtatttgttattgttaggtgtggtggtttatatttgtaattttaatattttggtagggggaggtgggcgtattatttgaggtcgggttcgagattagtttggttaatatggtgaaattttatttttattaaaaatataaaaaaaatttagttgaatgtgggtatacgtttgtaattttagttatttaggatgttgagttaggagaattgtttgaattcgggaggtagatgttgtagtgagcggagattttgttattgtattttagtttgggtgacggagtgagattttatttaaaaaaaaaaaagtatttgttattatgtttacggttgttattattattattattattttgagatggagttttattgtgttttttaggatggagtgtagtggtgtagtttcggtttattgtaatttttattttttgggtttaagtgattttagcgtttcgagtaattgggattataggtatgtattattacgtttggttaatttttgtatttttagtagagatagggtttcgttatgttagttaggttggttttaaattttcgattttaagtgatttatttgtttttattttttaaagtgttgggattataggtgtgagttatcgtatttggtttatattattattattattttattattatttattttgattattgttgtagtttttttattgggttttttattattagttttgttttttttttttgtttttttttttaattgttgtttgtatttagatttttattacgatgatttgtattttaatgttagtagttttttggttttgattaatggggaaagagattattttaatgttataggtgagaatttaggtttttatttgtgttgttttttttgtttttttgattttttatgtttttttttttaatttggtttgatttttgtggttgatttagttttttttttttttattttatagtatggcggaagaattttttgcgtgtgggttatttggtgttgattgggggttttgatgatggtgttattattttttggtagtttaggtaataagggattttgtggtttgaagattggttaaagatattttttaattttagttggtttttattttatgtttaaattggtttgttttttttattgtttagttagtgtttttttttttatttattatgttatttaagattaaaatttgggagttatattttaattttttgtattaagttagttattaagttttgttgattttttttttttttatttttattatttttttttttattttataaaaatttttaattttgaaatttttatagatttataggaaattgtaaagatagtatagcgaggttttttatttagttttttttagtggttgtattttatgtaattatagtatagtattaaaattaggaaatttatattggtttaatgtgtgtgtgtagttttatattattttattatattttttattatttttttatttatttggattattataatagtttttagttttgttttttttattttattttttagaaaaaaatttatggttttatggtattatgtgtttgtttgtgttataggttattatgtgtgatttgtaatgttatttgagttatttgaattgtttaataaatatttatttaatattatgggcgtaggtttgttttgggttttagggatgtagtggtaaataaaagagaagtttttaatgttatgtagtttatattttagtttgtaagatagttgatatatatatataaatatatatgttaggtaataaggtaggggaaaggattagaggatgttcggggtttagttttaatagtggtcgaagaagtttttttggaaaagttattatttaattagagattgaaggaagtgaaggagggagttgtgttttgggtggaagaattttttagggagaaggtttggtatttgtagaggttttgaagtacgtgtgagtaataaggaggttagtatggttagtgtataaggagttggggagaggataggagaggagttaaaagtggtagtaggggattaggtatgttaaattttagtaggttaaggtaaggtttttgatattttttttttttttttttgtgataaaatatatataatataaaattgttattttaattatttaaaaatgtatagttttgtggtattaagtatatttatattattgtaaaattattatttattagtattatttatttttagaatttttttttttttaaattgaaatcgtatatttattaaaaaatagattgggtgtggtggtttacgtttgtaattttagtattttgggaggtcgaggtagtggattatttgaggtcgggagttcgagattagttcgattaatatggagaaattttgtttgtattaaaaatataaaattagttgggtgtggtgatgtatgtatgtaattttagttatttgggaggttgaggtaggagaatcgtttgaatttgggaggtagaggttgtagtgagttgagattgcgttattgtattttagtttgggtaataagagcgaaattttattttaaaaaaaaaaaaaaaaaaaatatatatatatatatatatatttttatttttatttttcgatagtttcggtaattaggtttttgatttttttttttaaattttgagtgagatgggaaggtattggatagtttttagtgaaggtaggatattttttaaaatattgtaataatataatagtaagtgatgagttttatgtatattatgttattttatatttattataattttatgaatgatagtgatagtttatggttatataatatttttaatgttttaagttattgttttttttttttttttttttttgagatagagttttgtttttgtcgtttaggttagagtgtaatagtataatttcggtttattgtaattttcgttttttgggtttaagttatttttttgttttattttttaagtggttgggattataggtgtttattattatgtttggttaatttttagtatttttggtagagacggggttttattgtgttagttaggatggtttcgattttttgattttgtgattcgtttgtttcggttttttaaagtgttgggattataggcgtgagttattgcgtttggttaatatatatttttttttatatatagatagatatatattttttgagttggagttttcgttcggtcgtttaggttggagtgtagtggcgtgatttcggtttattgtaagttttgttttttaggtttacgttatttttttgttttagttttttgagtcgttgggattataggtattcgttattacgttcggttaatttttttgtatttttagtagagacggggttttattgtgttagttaggatggtttcgattttttgatttcgtgatttattcgtttcggttttttaaagtgttaggattataggtgtgagtttacgtattcggttttgtttggttaatattttttaattaaaagattttaattttatttggttgggtgcggtggtttatttttataattttagtattttgggaagtcgaggcgggtggattatttgaggttaggagttcgagaatagttggttaatattgagaaattttatttttattaaaaatataaaaattagtgggtttggtggcgtacgtttgtagttttagttatttaggaggttgaggtaggagaatttgaaattaggaggcggaggttgtaatgagtcgatagggtgttattgtattttagtttgggtgatagagtaaggttttgttttaaaaaaaaaagaaaaaaaggattttaagatttttttattttgaaataattttatatttaagaaaagtttgcgtttgtaattttagtattttgggaggtcgaggtatgagtttaggggtttgagattagtttgggtaatatggtaaaattttgtttttatttaaaatataaaaattagttgggcgtggtggtgtgtttttgtagttttagttatttgggaggttgaggtacgagaattgtttgagtttaggaggttaaggttgtagtgagtcgagattttattattgtatttttgtttgggtgatagagtaagattttgttttaaaaaaaaaaaaaaaagttattaaaatagtaaaaagtagttatttatattttttatttagatttcgtaaatgttaatattttgttatgtttatattaatattttttttttttaaatatatatatatttatttatatacgttaatgttatatttaaatataaatatagatttaaatttttttgaatatgcgtttatagattatttaaatttttttaattgtttttatagaaaaaaatatatagtggaagatttaaattaggattttgagttgtatgattttgttacgtttttttagtatttttttgtttgtttgtttgtttgagttggagttttatttttgttgtttaggttggagtgtaatggtaaatttcggtttattgtaattttcgtttgttaggtttaagtgatttttttgttttagttttttgagtagttgggattataggcgtttattattatgtttaattaattttgtatttttagtagagacggggtttttttatgttggttaggttggttttgaatttttgattttaggtgatttattttttttggttttttaaagtgttgggattataggtatgagttattatatttggttttttttttttttttttttgagataaagttttattttgtcgttaggttggagtgtagtggcgttatttcggtttattgtaatttttgcgttttagaattaagtaatttttttgtttttgttttttgagtagttgggattataggcgtttattacgtttagttaattttgtatttttagtagagatagggttttttcgtgttggttaggttggtttcgaatttttgattttagatgatttatttttttcggttttttaaagtgttgggattataggtttgagttattacgtttagttaattttgtatttttagtagagatggggttttattacgttggttaggttggttttgaattttcgattttaggtgattcgtcggttttggttttttaaagtgttgggattataggtgtgagttatttcgttcggttagtaatgtatttttgatggggtttttatagaagtgaggtcgtatttttagtgtattattttatgaagtatattatatttagtaaggtagttttgagtgttttttttgttatttgtttttttagtaggttttgggtttttttgggattttagtttattttgatttttttttttttttttttttttttttttttttttttttttttttttttttttttttttgagatggggtttcgttttgttatttaggttgaagtgtagtggtgcgatttcgatttaatgtaatttttatttttcgggtttaagtaattattttgttttagttttttgggtagttgggtttgtaggtatttgttattatgtttagttaatttttgtatttttagtagagatggggttttattattttggttaggttggttttgaatttttggttttaggtgatttgttttttttggttttttaaagtgttgtaattataggcgtgtgttattgcgttcggttagattttttttagtttttttgataatttttttttaaatttttttgtagtttttttggtttttatgatgtaaatgagatcgttttggagatggaggagtaattggtgagttttttgggattatttttttttttagtcgttgttttattttattttagagttttttttgtgatttttgagttgaagggtttattttgtggggaggaggtttaggattttagtagtaatttattttgtttttttttgtgttttttttttatgtttttacgttttttcgattattttgaaggtttatttgcgggatttttttgggttgaagattttattggttcggggggttatagtgaggtgtttaatggtcggtattttttatatagtttggtattttaatcgtattttttatgagatttgtattgaattttggtttttttgaggatatatttaggggtttttaggaatttttcggtttagagattaagtggtggttttggaaagtagatgttaggttttggtgtgtttgtgattattttattgtttttatattattttttatttttagtagagacggggttttagtagagatttggttttttagaattttttttttttgtttttttatgaatgataattttaggttttttttattttatgtttttttatttgggggattgtttcgtgttgttttttttttttaaggtcgaagttgggaagtgagaaattatgtttttaatttgtggttgtttttgttgttgttgttttttcgtatttggttgtatgggtggagaatttattttttgtttattataggggtttttttttaggttatttaggatatttttagttttttttttttttatgtttttttttttttttaaagttttttgatattagtttttttaatttttaagagggattatttatgagagtggggttttgaggtttttttatggggatagtttcgtttttgaagtgttagtgttggggaatatttgtggtttatgaggtttattttaggtttggggattttttagtttttatgattagtgttggagtatttttttgggagagtttagtttttttgaggttttaggtttttttttaattatttttgaataggtgttatttttgtatttatggaaataaagttttatttttttagtgtgatttggtttatttttaggtggaggggatttggttttttaaggagggtgggggcggagtttgaggtttgggtgtttagatgtttggtttagggtggggatttttttggtgttttcgtttttttttaatgtttattttttgtgggtttttggttttttgcgggtttttttttgttgaagataatttttttttttttttagtttttaagattggggggttaagtttagggttttagtggtttgggttttagttttatgggtggaatgcgtttgttatttttaggttagacgagggggtagagggttagggtgggtattcgttgtgtcgtttttgagttttgtgggttagagttgggtgtagggttggataatgagtttttttttttttgaaagaaggaattttggttgagataatagggttttgtttgttttggtatggggggtggtggttgatttaattttgttttttttaagttttaataaatgttatgaagagaggggggtagttttttttttggtgttttgggttgtttttttgtttttttgtgacgatttgtttttttagttttttttagttgattttgtttttttttttataatttgaattgttttgttttttgtagttggttttttttttgttttttaatttttttttagtttgttttgggtttaagggggtattggtggtgttatagagtttatagtttttgatttggggagtttagaaataggggttttagagggttggaaagatatttttagggagttttttgttggggtggggatgagggtagtgggatttgattttattgagttgattttgttggagttaaggaggaggtttgtgggagggggtaggaatgggaggattttttggtttagtttttttttttttttttagtttgttaggtttatttattagtttgagttgtttttgttgaggttggtttgtttgaagttttttaggagaaagaagttaggtgggaatggagagagagaggaaggtaagtggggagagaattttaaatggggaaagagtggggtttatttagagttttagggtgggtatgagttgcggggtgttttgttggagtaagggatgtgtatttagggcgttatgtgacggtgtgggtatgtgaggggagtagtagtgtgtgaaaggtgtggagtttttaggtgtttggtttgtgtgtacggtgtgaaggtatatagttaggggttttttttgtttgtttgttttgtttgtttttttgagacggagttttgttttgtcgtttaggttagagtgtagtggtatgattttggtttattgtaatttttgtttttagggtttaagggatttttttgttttagtttttcgagtagttgggattataggcgtttattattgcgtttggttaattttttgtattttttagtagagatgggttttattattttggttaggttggtttcgaatttttgattttatgatttatttattttagttttttaaagtgttgggattataggtgtgagttatcgcgtttaattagttagggttttgaaggtatgaagttataagagggtatgttaaagataggagggttggttaggtatggtggtttatatttgtaattttagtattttgggaggttaaggtaggcggattatttgaagtcgggagttcgagattagtttgattaatatggagaaatttcgtttttattaaaaatataaaataaaattagtcgggcgtggtggtaggcgtttgtagttttagttattcgggaggttgaggtaggagaatggtatgaattcgggaggcggagtttgtagtaagtcgagatcgtattattgtattttagttagggtgatagcgagatttcgttttaaaaaataataataaaaaaaaaattaaaaaaaaaaaattttagttatatatttttatattttataaaataaaataaaataaaattagttaggcgtggtggcgtatgtttgtaattttagttatttgggaggttgaggtaggagaattatttgaatttggggggcggaggtcgtgcggtgaggtaagaatatgttattgtattttagtttgggtagtaagagcgaaatttttttttaaaaataaaaataaaaaaaaatttaaaaaaagataggagggttataaggggagggttgattgtgtgtttttttaggttgtgtagaggggattagaagtaagtaggttagaggggaggtggagggagtgtgttggggtgtgagtttttatgatgttgaaaggattatgatatgttaaggataggatagtgttgggttgtatatataggtgtaggtaattttggtggttagtatgtaaaagtgaatgttttgatttttttagagggtatttgtagagtgtttttggagggattagtgttggagaaattaataggagaggggacgggtatttattaatttttttttgtttgtagtttgtagggtttagcgttaaagcgaattatggggtttagggttgagttgtgtatttttttaggcggattttttttttttttgttattgatattaggcgagggggttaagggtggattttttagagagaggtgataatagagggggtagggttcggggtgagttttttttaggagttttttgttgggggtggggttttataggaggtaaaatataattgtaagtttagaatgggggtgagaggttgttatttggagggagagcggggggttttagtagttttttgagggaagtgggatttttggttttttagggtttggtttatttaattttttttattttattttttggtatggacgtagttagggagtttgttttaagtagatattggtggtttcgttttattataacgagttttatagttaattagtgtataagttttatttgattttgtgcgttgggaggcgtatttgtagtatttataggtgagggatggggagatgggattttaagaattttaattaggattcgtatttagggttttgagtcgggcgttgtgttttaggattatgtatcgcgttatgtggcgggaggtgaggcgggaggtttagtagatttatgtagtgtgttgttagggttggaagaagcggtattcgggggcgtttatttgtgaaggtgaggttgggtttttcgggttttgcgggaggcgcgttttacggagttggggagttgggtcgtcggtttgagtttgaattttattttttttgtttttagttatttgcgttaagttttgtttgaacggaggcgtttgcgttaggtttgattagtgcgagtgcgttttcggttggggagggaagtattgttatgtgggtgagttagtttgttttttttatttatttaggtgtttgttttcgtttttttttttagttttttttttttttcggtaattagacgtggatgaatgtaggattagtattattttttgttcgtattattgttttaatacggtaggtagttttatttgcggttgtttttatgatttagtgttaggcgtggacgggcgtatttgtatggaggggtttttagagtttttaattagtgttagtatatttagcgtggtcggtgagtgggtaggagtacgggttattcgagggattcgggacgggcgttcgggttcgggtagtggttatatttttggttttttttgtttttagttcgggaggcggaaaaagatgagcgcgttttgaagtaggagatttacgagttgcgagggcgtttggagcggttggagtaggtgagttaagtttgttgggtggggcgaggttagacgttattgttaatattttgaggtatttttttttttttagtgggtcggttaggttggggtttgggttagagcggtgttgttcgtgtcgtttgaagagttgtagttagaataggtggttgagttgtggggtcggggtgatcggatcgaattttttagcgattaggtgttgttgttggaggagaggttaggtgtttgtgagtttttatatttttttcgttttgatttttattttttaattttttttaagatttttttttatttaggtatttttttttttttttaagtttttttttaatatttattatttttatgtttttttattttattatcgtttttttttgaaattttgtttttagtttaatagttttatttattgtttggtgagagtggtagtgtagtttattttaggttgattatagttattgtgtttgttatgttattaattaggtttttgtgaggataatagtttgggtttcggcgttaattatcgataagaagtttttatagtatttttgttttttaatttatatagaaatcggatttattaattttttgggattggtcgattgtgagttgtagataaggttattagttattaaagagtaatgaataatggaaattttagagagttgaagaaagggggaggtttgtgtttttggtttgtttttgagttttttggttgggggtaggttgtttgggtaagaattgttttaattttttaataaatgtaattattaatatttagatttttttttttttttatttttagtttttttgttgttatttagataattaataaaaattaattacgtaaaattgggttttattttttttttttgtttttagtttatttttttagttgtgggaataggtttggagtgagaggtagggagtggttaatgttattaggaagaaatgaaaattggtttagagagggggaagttttaatagaaaaagaaataaattaaaagtttttttattttttttagttagggttcgtttttttttttaattttttagggggtagaagtgagtgtagtatttgatgtttgttttttttttttgtgtttggtgagatggtgtagtagggttgtagggggttgggtggggttatgtttattgaagaattgtattatggggatagaaaattagaaatgtggagattgaattggtattttagagagtgtacgattttgggtatttgggtaagggtaggtatgagatttttgaattagaagggtttagtttttattgataggaggttatattgggagggaaggtgaaggtgttgaggaaagtttttaggatgagtttgggagtgttttaggtattagtttttagttagagggcgagaagttttttttataaatggatgagtttattgaatttatggattttggagtgggggggatttgttttaaagaatggatgagtttattggttaatgtggggtagaggggtagagaagattatataggaagagattttattggggatggaatgttttttttttttgtgtaggttgagttattggagatgagggggaggtaattgttttatagataagatagtaggaggtgggggttaagagtggagattgtatcgaggtaagagtttatggatggggttaagagggggtaggagtggcgttgtatttatatttattttagaagttgaagattttaaataggagaataagtggggagaggggagataaggaagagggtttggttttgttttagggtttattgggtgggtaggtgtggggaggaagatggggatagatgggaggagagtttagagttagggtttatttatcgtttttaggtttttttagatagttattattatttcggttattagtggagatttttcggaaaatagtgagtatggagtgtcggattttgttagttagagttgggacgttatttggtgttagttttttcgtgggtattgggggtagtattcgtatttgatattgttttggggtaaggggagtattattatggtttgtttatttaggtttttgtttataggtggggtttagttttcgagtgatatttttttttaattttttagttttttttttttaattttggataattatttttgggtttgttagttgttatttttgaggttttttttttatataaagttttttttaatttttagtttagatatttttttagtatttttttagttttttttttttgggtttggtatttattgttgaatgagtgttatttattatagttttgtgtatataggttttattttttttgttaagattagtaatagttttttttggtgggattaagtgttatttatttggtagggtatggtgggtgtttagtaaagatttattggttgatgtggggttagattagatgattgtgtagatattttatggttttgatattgaatgatttttttgttttatagggatgtttttttagttttttcggatatattttattttagaattgtttaaagtttttattcgaggtgaagcgacgtttttttttgtagtagaagttttggtaggaggatatgattatggggataatgggaatttggggaagggttaaagtaggttagtttatagttttttttagagatttttataataagtttttgtttagagatgagggaatggtgggggttggtagttgagtagtagaacgaagagtagtagttatttgggtttgtattgtaagatggaaggcgttacgtttgaagggtagtatggagttattgtggtttttcgtttttttaggaaatatttagatttttatttgggggagaaagagggttaaagaagataaatatatatggaggagttagaataggtgtgatgttataatgggatttttgaggtttattggttttgtatattagtttatttataattgttttattttgtatttttttaattttttatttttttaggatgatttacgttttgggtgagtagggtttgggcgattttagatatgatattgatggtatttttcgtgcgttttcggtcgatgaagatgatttttgttagttagtaggttagttcggtagagttagtttatagtagttcgcgtttggtaatgggtatatagcggtttggtagtatttttattattttttgggtagggtgggagtgggtgaggatcggggtggaggtagagtgttatagaaggtaatttattttatttagtttattattttttggtagggattggaggtgaaggaggagattaggtagggaggggggttttaagtgaaggaaagggtgattaaaagtatatgtattttgtttatgagggtagttttatttagggaatgaaggtttgagtgggaggtaagggggtaatgttttagaggaaggggaattgaggatttttaggagaagatattttagggaaggttttaggaggggaggtatggttgggggaggtgtgttttgtggtggggttttattaagtagatcgagagagttttggtggttggagataataatatagggttgcgagggagggaagtggtgagtttttcgtatttttattcggatttcgtataggtatttgatgtggagtagtattagacgtaagattttgtggggttatggtaaggggttttagtgggatttattgatgtttatttgtatgttttagttttttttattttattgtttttttgattatttttgtagttttttttttattttttgtttttggttttttttagttttttttatatatattatgttttttttttttaatttattatttattttgtatttttaggtttttttattgtttaagattttttgttttttattttatgttttcgacgttgcgttttcgtacggtatatatagggatggcgagtatagttaggaagaggatttagttattgtagaaggttattttgaagaagtatttggtattggggttgtagaattatagggtgggtagtaggaagagtagtagtaggaagagtagtagtagtagtatttatgtttttggttataaatttattttggttatttgtaggggatggggtaagggataattagtttggtttttggaggagagtggggtaggtaaggtatagaaggtagggttgggggttggtgttatgaggataagggtttgagatataaattggggtaggggttttattgaaatttttttaggaaggttttttaggatgagggtggtggagaaagagtttaggattgtttttttattattttttttaaaggtttcggatatatttagataagagatataagatatagatatttataatttatagatatttgataataaatgataataagaataatagttaatatttgtagttggtaagggttttataatggtttatatttgtgttgttcgagaaagtagttattatttatatgtggttatttgaaatgtagttagtttgaattgagatgtgttggaaatgtaaaatatatattagattttaaagattgaataaaaaataaaatgtgagatatttattattaattttttatgttgattatattttgaaattataattttgggtcgggcgtagtggtttacgtttgtaattttagtattttgggaagtcgaggtgggtagattacgaggttaggagtttaggattagtttgattaatatggtgaaatttcgtttttattaaaaatataaaaattagtcgggtttgttggcgtatgtttttaattttagttattcgggaggttgaggtaggagaattgtttgaattcgggaggcggaggttgtagtgagttaagattacgttattgtattttagtttgggtaatggagtgagattttatttttaaaaaaaaaaaaagaaattataattttttggatgttattagatttaagaaaatatattattaaaattaattttattttttttgttttgtaaaaatgtggttattataaaaaaattatattgtggtttgtattatatttttgtagaatagtattggtttatatattaagttaaatttttaaaatgatgtatatgatagtttagaaagtattattattatttatattttataggaaataggtttagggaggttaaataatttatttgaggttatatagtttttaaatagtagtttttaggttaaatttaagtcgtttgtgtttttaattattttattacgttgatattggtatgtattgtatatatatatacgaatatagtatatagtatatatggtgattgtgatagaatatttatagttatatatttaagggttaaatggtaagattaaaagttcgtgttattaatgttaatagatatatagttatataaagattaatatgtttatatatagatataaatttataattatatttagtgatagataaaagaatgtaaatgtataattagaaaaatttttttttatttaggtagtttttttatttttaggtaaatttatggatatatttggaatagttataaagattaattttatttttagataggtaaacgaattttattatttttttttttttttttagtgatattttgcgtgggtaggtatagtgtgtgaggttttattaagtgaaaaaaggagggaatggagtaaaggtgatttaatagtatttgttttgggagaggaaagggtttaagaggaagagaggtaggaatatagaatttgtgttttaggtttttttttttttttttattttgttttagtgttgggggtagggtaataatttataaaaagggtgtttaggtaaatatttgttatttttattgaggttataggtattgtttttttatgatgggaagggttatgtttaaaggtaagtttattgttaagcgagaaggtaataggtaatagaggaaataggagattttgttagttggaatatcgtaggttttttgagttgttttattttattgtttttataagtttagaatagtattattttttttttgaattatgtggagtaggtttttaattttttttaatttattttttacgtagtaattatagagatttttttgttagtatagatttttttgaaatatagagtatttttttgttttgtttaaaggttttttttgataagttgatttttgtttatattttcgattatatttttataaaattttttgttttagttaaattgatttattttagttttttagatattatgattttttatgtttttttattttgaatatgttgttttttttggttggaatgtttgtttttttttttgttttatatagtttagtgttattttttggagggttgtttgaatttttttaggtttgtgttttttttatatttttattttgattagcgggtttcgaagtatagaaatgtaaattattagattttattttagatttattgaattagaaattttgggtattaggtttagtaatttgttttttttttttttattttgttatttaggttggttttgaatttttggatttacgcgatttttttgttttagttttttaaattgttgggattataggtgtgagttatcgtggttggttagtaatttgtattttaataagttttttggtgagtttgatgtgcgtttgaatttaagaattattgattttgataatatattatgtgttgattggcgtttttgtttttttttttaggttgtaagtagtttaaggatagggattttgttttatttttagtgttaggataataggagatggagtaggtgtttaataaatatttgttgaatagattttaaggttgtatatttatttatagagttatagttaatgatagagatggcggttttgattataaattagatagttatttttttgagtagaagtgattattaaaagaagttattgagaaagtaacgaatatattaagtttaatggtaatcgattttgaatagatatatgtaatatatagttataatgaaggtagagtaataataattaggaagaggttattttataagagaaatgtatcgaatgggattaagatgttatagggaaagatgttgtttttattaaatgtgtgttaatagtgtaaagaatggaggataatgtttataaataaatattaataatggggtttatagtaggattgattttgtgatatgtattgagtttatggatatagattgtatatagttattggaaagataatgtttgtgtagagaggtatgggttagggaggttattaaggtaaggtatgtagggatggttttttgtagatttggagatttagttattttttttttttaatatttgatattaagtgattttttttggagaataaaagtttaaggatttagaaatgtaatggagggttaaatttaatgagtatacggtttataaaatatattgatgataaatttataatatatattttatggttttgttatattagtgtattatgtaaaggcgtatatatatgtgttttgtgaattgtgattgggaaaatatagtaaataggttaatttagttagatattagagtgtggggtatttagttaagttatgggattttatatatgaagattattgtaaatggtaggattatggatatgttagttaaagtaaaataaggtatataatttttatatgttgaaataaatatgttaaaatataaaatgtgtaagtaatatgaaattatagaataggtgtaatatatgaaaatttatatatatgcggtatttaaaatatgttaaaattggatgtgagatatggatataagaatgaagaatgggtaattttgatagaaaataatatattatttttatatagtttatggatagtattgggataatttagttgtatataagttattaaatatgttaaaggtatatagatttaatgtagaaaatatggtttttataaggtatttgtgtgttagtaagggtttagtagtgtggaaggttattgagaaataagaggttttgtgtttagatggaaatagaggtatttaagggtatttttaagaggtaaattttgttggttttttttttttatgattttttaagagttatgtggggttaaagggtaagaaaaggaattggggaaggtgtagggaattttttttttaggattttttgtgtacgtttttagttttaaatttataagggtttttatttttttttttttttaggttttttttatttttttttttttttaggtttttttttttatttttagtaattttttttttagtcggttttttttttttttttagtaatttttttttttagtcggtttttttagatttaatttttttttttttttttattttagtcgtttttagtattttttttttttttttttttatttttttttcgtttatattttagaggggtagggggtttggggggttggttttttttttagttaggttgcggtagcggtggtggcggatggttgtgtttttgtttttgtcggggtgtcggtgttaagggggcgacgggatttgggggtgttttagtttcggtcgatggaggggaggtgggagtgggaggttgggtttatagcggtaggaatggtggggggttgtttttttagtattttttttttttttttttttgttgtttttttgagggttggggttgttgtcgtcgttattttttcgttatttttttttaacgtttgttggttttcggggtcggttaggaagtggagggcggtgatgggtagtttgttttgttaatcgttttttagaaattttggtattttttttttatatttattagtgtttttttgcgagtttcggtttagggttttttttcggtttttgtttttatttttggttttagttgtattttttttttttttaatttttttttagttttggattttttggtgttgtattttttttttcgtatatttttttttttattttttattagtttttttttaattgttatttttatttggttttttttttttttaatttcggttatttgttgtttattttttttaattatttttaaggattttttttttcgtatttatttaattttaaatatttattaagtatttatttattatatgataagtattaagtttattttttttttttttttttttaggattttattttattttattttattttttagttttttggtttggttttttttgttttttgttttttattattttttagtagtttagtttttttttttatttgttttttttggtttttaaagagaagagatttttttggttttatttttgattttttttttttttatgtttttttatttttgtatttttttttttttatttttttcgtattagtttttttatttgtttaagttgagataatttttttttataatatataatatgggtatatttttttttttaatggaaatttggttttaggggtgttttttagaaaaataaaaagtgaggaagaatgtcgatttttttggaatgcgcgtgtttttttaatttggtagttatgtatttagttttttatttttttttttttttttttatttttattatttttttattaggattattttattattttatttttttttatttttattttttttttttaatatttttttttttaaattttaagttttttgaatttttatttgttttagtttttttttacgtaattgttaattttttatttttttttatttttgagttatatgggattttttattaaggttttttttttagttatatttttattttgtattagtttatatgttttcgggaagaggattggtagtgggaggattgttatttaattttgtttttttagttatagtgagggttagtgattgtaggaaaagtttaaatttttcggggtttaatttgggaagaagattttatttttgatgggtaaattataaagaggaaagggcgggtttagttttcgcgggtttttttaaaaggggcgggttttgttttttttgtattatttataaaggggttgagtttagagtttttttgttttgaaggtttaaaacggagttgaagttaattttgttttattttgtgtataatattaagaaaggggtgggtttttagtttagttttgttttgtaaattatttaatatggggagggttgagtcgtttagtcgaatgagttgggttaatattagcgtcgtagatcgatgtttttattatttaaacgtcgggttaattttagttttgtttttttaattaaaagggaggggtagatttaagttttgttttttacgttattaaaggaggttggagttattttgaattttgcgattttagtgttttttttttttttttagtttttcgtcgtttttttcgatgtcggttaattaggggaaaaggaaaaggtttaattagtagaaagtttatagttgaaggattcggatgaagcgagtttaggattttgaagtgtaagtttcgttaattgtagagtagttattatggcgataagataggggtgaagaggtggaataagagaaggttaaatttttataggattggtttattttcgtttcgtcgcgtgttgcgtaggcgcgttttatttaattattatttttcgttaagttttagttaatgagttgatttggagttatacgttttaaagtttaatagtaattcggatattttttaaaagaggaagcgaaggaaagaaaggggtttatagtgggcgaggtttataggtagtttcgagtaaattgtttatggttttggttatgattgataattatttagacgaataaagttttttttggttaggcgatagcgtgtagcgagttattattaattttttggtattgtatattgatttagatcgtattagttaatagttattgtgcgaaggtaggattgtattaattttttttcgtttttattttttgggttaatttttttttttgaattttttgtgattggtaggtatttagattaatagtgattaggaaattttgaagtttgtttaacgatcgtgggtaggaggtggtttttggtttgttggggcgtgtgtatgtgtatttggggggattgaagggtacgtggggcgaaataaaatcggttatggtagtagcggaggaggaggacgggggtttcgaagggttaaatcgcgagcggggcggggcgggcgcgattttcgaatgtaatatatgtttggagattgttcgggaagttgtggttagtgtgtgtggttatttgtattggtgagaatcgaggaggggggcgggaggtggtgggtttcgtttatatattggagaggttaggagcgaataattatatagttatatagataatcggagggtacgtttttataggtgaagttcgataggagatataagattttgttggtatgtgtgggtgggagtataacggtcgagatttgtggaaagaaaggttttaggaattaggagttgaggtacgtgatgtgttgagaagagaaggtggggcggggagtggtaggataatgtgagattcgagttattttattttagagaagtgaggggttttagttgtgtaggtggaaataagtgagatataaaggttaagggaggtacgtattagttgagtcggggagaattaggaaatatggattatatttagatgagatttgggagggggttggtataagggtattgtggagaggtagatttgaaaggttaaagggttataaagatagggatattattgagtttgaaagtgagtaatgggggaatgtgttagtaaaggggtttggtttggagtgatggggttggggttgaaaagaggagatttagaaagaggtggttgaaggaaattagaaattaatttgaaaggtagaaaagagagggtacgaaaatttgtatgtgtttgttggggagaggagaaaggagagggttgagtgtgttgaggatggatagagttttaggtgttggaagattagataagtaggaaggttaattaagttggttggtatggtagaggttgtagaaaatttgaaaagtaatagtaggttgtttgggaagaggggttagatgggattttgcgaagtttagggtttgtgttttttttttttgtagttagtttgattttttttttttttttttttttatttagttggttatgtttttattaggtgcgtatttaggagatgaagagggaaatggggaggtttgaggagttgtaagatttttttgtatattggaaattattttttttttttttagtggttggagatacggttagaacggtaagagtgtttagtatgtaaagttgggattagtagagagaaggttgtttcgttttatgggcgagggagttagaagttttaggattttaggtgagagattggaggtgttgtttagggaagattgaaggtttttgtttttggaaaacggtgtggaagatgggaggagaaaaatttttgttaattttttttttttatttttttagattaaaaattttatttcgtttttagggttagagattagtttcggagagtagaggggtgagtttttttgtttagttgtgttttttttttgatagatttgtcggtttttcgtttgattttttttgtttttttagggattttagttatttggtgatatcgggggtttttattttttatttggtgttggtgtttttttttttggtttttttattatcgtttttaatgtttatgagttttttcgtcggggtataggtaagagttatatttagtttttattagggagttttgtgaatttttttaggtttttttttagtttaggagtatatgtttttatagttttttttttttttataggtgtggatttgggatagggttatttagtttttagttggtaggattttttttttttgtttttcgttatttttttttttttttggttgtttagtatttgagttatgtttgttttttgtttatttttagttagagaagaattagtattgagggtttttgttgattttttcgtatttttggatttttttgatttttttatttttgttggttaaggttagttttggatattgtttaggaaggtttggggaggaggagtgaagtttgtgtatagatgggagagttttttgtttagaggtttatttagtaacgttgtttaattttttgttttggggaaggaggatggattgagagaatgtttttttttttttttaagtttttgttttttttgattttttgatttgatttttaaaggtgggtaaagttttttttgattttttttttattttttattttattgatttaatttaattttttattttttagagtttaatatggattttgatttttaagtgttttcgtttttttattattttttttaatataaatttaataaaaaaggtgaaatatattgatgggatttttttttaagttcgtttttattttcgatagaagtattttttttttaatttgagtagatgtttggtatagtatggtgaagtatgggggtgagttttttttttttagggtttttaagggtataggggtgaggttgtgttttatatatatatatagatatataagagtaagatgtgttaggtgtttaattattattgtggggggttttggttgtagaagaaagtttggtaaggtggggttatataggagagagattatataggagagagttggtttgaggttagaatagtttaagggaaaaagaaaagggagttgatggatgggatttgtttgtgggttttttaaggttttttagtattattttcgtttgttttaggttttttcgattgatttagttttgtacgtttttttttttttttttggttttttggggtttttttgaggagaaagattggggggaatgcggtacgttgtcgttttatttttcgattttttttcgtttgttgtttggaagttttaggtttgaggggtttggttttttttatttatttttttttttttcggcgttgtcgtttttgttataagatgattttaatgagtagggcggttgtttttaggttttttaggatttttagggttagggttagagtttttagttttgatttttttatagagtttgtacggagatagggaaaattgagagtatagttattattatttattattttttttttgttgattatttttttagttatatgtgttgggggttattttttgtttttttgattttattaaattttttatttgtagttggttttttttcgtttggttttggaagataaagttggatttagttagaaaggaagatttcgggttgagagagggttatttagtgggagttttagtggagtttttttttttttttttttttttgagatggagttttatttttgttgtttaggttggtatgtaatggtgcgattttggtttatcgtaatttatgttttttgggtttaagtaatttttttgttttagttttttaagtagttggttttttaggtagttgggattataggtatgtgttattatgtttggttaattttgtatttttagtagaaatggggtttttttatgttggttaggttggtttcgaattttttattttaggtgatttgttcgttttagttttttaaagtgttgggattataggcgtgagttatcgcgtttagtcgtttgtttttttttttagtttagagggaagaagggagaggtttggttgtttttttggtagaatttgggtggggtaggggaggtttgggtgtgggtgtatggagggagaggtggggtggttgttagggataaggttagaatggggtaggaaattagagtttgtgttgttttgtattttagttttagggtttgtagggtttggggagaggttttatcgatgatgttgatgttgatagtacggtttttttggggttcgtggttggaatgggtggttatatagttgtaggttttttggttttgaggttttattttagggaggattagtatagggttggggggaaggggtaagggtatattttggtgggggaaggggagaggagattattttaaaatttttgtttttttgtttttatatttttagatattttttttttttttttagtttttagtttgtttttttttcgttagttttttgttttttttgttgttagttatggtttattttattttttagtttttttttttaggttatttatattttttatttagtggatttgaggagagggttgggtagggattttataggttagggttacggttttattaggagttattgttttattttttggttttattattaattggattttttttagaggtataggttttgggagttggaagggttttgaggtggagagttatatttgtgagtgattttagtggttatgggtttgattttttttttttttaagggttagatttttagaacgtgtttacgtgagtttggggttttttttatttatgtttattttagatacggggttggatgggggttgtgcgtaaggttcggtgtcggggaaggtttgggttgaagttataggagaaggtgggacggggatttttttttcgggttggggttattattagtttcgattgtagtgtgaagagttttgttttagggtgttttttggtttgtttttttatagatatttttatgatgggaggataagataaattattttagggtgggtgtgggagtgagattagggagaaggtagtttggggggtattttaggatttattttttttattaggtattaggggttttttatttaagtgttagttaagagtttttgtagggtagtttttttttgatatatatgtttttatttggggaaagagtggtgattttagaattttttgaaaatgagagatgttatatatttatatttatatatattcgttttttgtttatagggtcgttttttattttttttgtttttttttattattttattgggaatattagtcgtgagtttagaggtagaatttataatttttggttttttaggaatttttgaaggaggaaaaatttagttagaggttgtaattgtgaaggtttttaaattttgtgtgtggaaatgaggttagtggaagttagaggtttttatgggttaaggttggggttgaaggtttttttttaggtaagagggaggttttggagaagattttggaatttttacggtagatacggattcggtagttggatttggttttttttttatttttgtttattgtttggtatcggaaaatttttttattttggatttcgatagtcggaaggaagagggagtcgttgggaaggatacgagttatattgttttaggggttttttttttggggagataggattttttaagtttttgttcggtttgtgttttagaagtagagaagtagggtttaaatagtgtaaggtttttgggaaaggattgtgaggtagagtgacggggatttaaattattgttggtttttttggaagttgggaggttgtaataggagtttcgtttattagtttttattttagtcgttggggtggttttttgggggtttttttatattttagtattagtggttcgttaattcgggttgtgatgttttgagtatttattattgtttttgggagatagtattatggtagaggggtaggaagggaatgagggttaataaaatttggatagggtgggtgagggattttgaaaggtattttttcgggttttgggaaaagttttaggacgattggggtgtggggttaaagtgttttttgtagggagggttagtggggttgagggagtggtttattttatagattgaggattagtatttaggttttaattgttgtttcggttgttattttgtttttttttagggttttggttttgtttgtttttttttttgttgtggttttcgttttaggtggggtttgtattttttttttagtttttattttttagtcgttttgttatagggaatgttaggaatttatgtttttgggataagagttttttaggtattagagaaataattattattttatttttgggtattattagtttttgggtatagttatttttttgggggatggggagtgtattttttagggttttatttttttagagttttcgattttatttattttattagtttattagggttgtttggtgatttattggagttttattttgattgcgtaaagttgtattaatagggtttaggttagattgttgtttgtaagggtgtaattgggtttgtattatgaaggtaaggttggggaataggagagaaatttgtttggaatttcgtgaaagaaaattattttttttttggggttttttatgttttttgaaaaaaatttttaattaaatttagggaaaaaagaaatttttttatttaaaattgtattttgttttttttttgtgaaattatataagtttataagtgaggagagaattgttttcggtttatgttttttatttttttatttattatatttttaatttgtttttagttttgttcggatttttaatgggaggggttttttattttgatagttttgtaaaattttgagaatgtttgaggggattagatggtagttagtttagggttgaggatgggatagtgttgatgttattttttttttatatttggttttttgtaattttttttttttttttattttttgattttggtgtgataaaaagatattttatttatggggaaattgaggaagatatatatataagtattttaatttatatttaatatatttggtaataattttttttttatttttttttttttaatttttaaatagtagttttttaaaaaattaaagatatgttatttataggggaagatggtatttttaatttttttaaaattattgagtttagttttgtttaagggttgtgggaagaagggggatgagaggttagtagggtaagttttttattgtttttatattaaatgcggtagaaatttgtttgtatgaataaagaatatttaagggattttagggggtaaagtttggtgttttgtaaaatttattttttgatggataggtttggagttaggggggtttttttattagttttgtttgttttttttttttttattagaatttttttggttattatttttaatatgggaaagtaagaaataaaaaaaaaagataagaaattaatatatttataaaaaaaaaaataagttatttttttaaattaaattaaaaattaagaattattattattattattattaataataataaaaataataataataataaaaaaaatagatggattttagggtttttttttttttttttaaaaaaaaaaaagtttaattttaaagtttagttaataattttttaaagtagtagaaatttttttcgaggtagatatttgagttagatattttcgtttatcgagcgattttattggtttaagatgagttgcgtatgaggtaagtaagtcgttcggaggggcgggggtggggatgtatgggggcgtggtttatgttttttgtttagaagttatgtttttatttttggtatttttgattgggtagggttggcgtttttatagattttagagtatataagtggggtggggaagggaaagtgggggagtttaggagagaaatagaatagttgtaagtgggagtatgtgtgtgtgaggtgtgggagagggagagagaaagatagaggagaaaaaggggtttgagaaataggtttttcggtatgtgtatgtttttgtgtaagaaagaaagcgagagaggaaaaagatggaaaaaagggagagatagattttatattttttttagaggttttattttttttgttatgtaattagtatttttagtatagagagtttcgttagggaggggatgattttattggtttttttttgttttgtgttttttttgtattggggtttgttttttggaagtttgcgttttttttaagtcgttttgtgagagtttttatttttgtgattttgaggggtaagattagttggaggtattagagtgaatattttttggttttttcgttggggatgttattgaagagggggttatagttttttgttagttgttatttgtttgaaaggagagatagagtatagaaaatagagagagttttgggaattttgtgtgggtataatattattagggaaaatgtttttttgttttgtgagaattggatagagaggagttttaggatttatttatttttatttttcgtgggttgtatatttggtttttttcgaggttatttttatagttttttggttttatcgagtgtcggagtgattttatttgtaggtagtagaggaaggtatgatagtgaagagaagttttagaggaaagaggttttgtattttaaagtagaggaaatggagttggggaaagttttattcgagaggagatgggtatttgatttgggaagtagaataggaattttcgttgagtttaggtatttttagaaatatgtttttagattttgagagattgaaagagtcgttagagttttgtgggggtagagagggaagagtgtaatagagttcgtgatggtagaggatgaattataatttttaatttttgtggggatatgttattatattttaattatttataaaataatattttaatatatagaaagagtaggttgttttttggttattcgtgggaagaaaggtagaattaagattattggaatggtttttgttttttgatatttttagtttattttagttcggttttttttattttaaaaggttttttttttgttatgattttgtttagataggaagtgggaataaaagtaggaagtgtgtaaaatagttagttggggtgatagtgggatttatttgtagaggaagggggtgtcggggagttggtgcggttgtggtttttttgggtgattgatacggcggttttgatagtatagatgtttgtttttttttggaatttttcgatgttttttttatagcgaatttttttgttgttaaattagttggagatttgtggggtagaaaggagggttaggtagaaatatttgtttttgaagttttttattgaataagatgtgagtgatagtattttttttttttttgttttttggttttattatgttgttgtttaggttggtttttaatttaagtgatttttttattttagtttttttagtagttgggattataggaatatattattgtatttagttgagatgcgtgtattttgtttgataatttttttcgtaatttttataatatttgagatacggtgatgttatattttttggtaagtttttttttggtttttttattaggatatgggttatttaggtgggagtagaaatatttatttaggattttagtggtttgtttgttgaagttacggcgttttcgtttatagaggagggagaagagcggtgaggaggatgttgatgttttggtagggttgttatatggtatgattttagagttattattgttatggagtattatgttgtgtagtatggtagtttagggttttggagaggaatgggaaggagtttagtgttgggggttagtttggggtttttgggtttatttggtatttaggaaacgggagcgtaggattattatagtttcgtaggtgttttgttttagttgtatttggatggcgttgaattttcgatggatgatgtttattatgcgttttatttttttgggggttacgggtttggtgcggttttgtttttttagtaggtttatgatatgggtcgtgaatttattatatgtttgtagtgggggttagtgggttggtgaggaggagttttttgattatgggatttttttgtaagagtttttttttttatttatttaagttttttttttttatttgtttatatttttttagtttcgagtggtatatgtgacggatttgggtaagtttgttgcgatagttcgagtgttcgatggagttgttaggggatatattattattagaggttgtagcggttgtagttgttgttgttgagtcgttttttttttcgggtttagttatattttttgttagaagtatgttgtttaagcgtattagttgtgggtttatcggtttttttttttgggagtttcgaatgttgaggtttagtatgtaggcgagtggatttagggatttagagattttaatatttagtgtttagtttttttggtgttttttggagagttaagtttttaggttttggttttttttttagtttttttgattttttattttttttagggttttaagttgttatattttagttttataatgaatagggttttgtttttagagttgagtaattcggggggggtttatatattagttttttttttgattttatataggacgttaaagagagtaggttttattcggtggtagtttagggcgtgtttttttgggaggagtgggagtggggaaagagaaaagttgaggagttagagaaatagagtagggggtttgagaataaggagggaggagggttagtttgcggagggaggaagcggattgggggtggaatgagttgggggtggaatgaggagtttttgggaaaagattagtttttagagtatggggaagttttttagttttagggagatatagggaagatgtaggtagtaggttaaaggttgcgggttttgggagatggtttagaaaggtaggaggaggaatttgggagtggatggagaaaggaaagtgatttggtaggttttagagggagagagatagaagttggggttgagaagagttagagtttgaggtggtagagtggggttgggggtgtcgagttaattggggagattagtgtagggtgtgtgaaggggttttggggttgagtaggtgggaggttttgatgtatttagtgtttggttgagtagtggagaggagttttaggggttttggagagggtgtggaggtttttatatttggagagaatgagggggttgggtggagagttaggggagaagataacgtagtttaagaatagttttttagtttgggagttagagggggttttcggggatggggttgttttaggagattgtaggggtcggtaaaaggttaggagtggggagtcgggttatcgggggttttttttgtgaaggttttagggtttgggggtgaagggaggtttgagagggattatttttttatgggtttttaggaataaggagagaagagagttgttggattttggagagggttttggagttggggggggtttttagaagatttagaatatgtgaacggggtttgttgggtttgtgtggggtttcggagtgggggtatttatttggtttgggtttcgtttaggttttggtcggtgatggttattatttgttgtagaatgttttcgatgttttgtttttttcggtttttcgggattttttcgttatttttatcggggttttcgttatcgggaggttcgttagggtttttaggttttttatttattaattttaggttttttcggttttcgtttggagggggcggttttagtagtcgttcgtttatagttgggggggggttttgaggttttttttttgtttcgttttttttttcgtttggttatttttttttttaaattcgttggggtcgttgtttttttcgttttaattttcgttcgtttgttttcggttttcggttttttcgggggtttatttcggtattgaagggagatttgggatatcggttgggttttttataggagatttcggttttcggcggcggagaaaatggagtcggagagagagaggaggtttaagcgggggtgtgtgtgagagagagggaggagggaggagggagaaggggggggagcgagggagggaggttgggggaggggagtcggagaggaagaggaggggagaagagaggaggaatagggaggagttgggggcggagagagagatatagaaatagaggaattgagatttagtggaggaggggagagggaagaggggatgaggggaggagacgggttatttgaaagatatgggaaagttttttggttggattttcgcggtttaggagtggggttgtgttggcggttgggggcgtttgttatttgggttttgaattagggatttaagcgatgtggatttaggtcgttggaatgtttgggtttatcggtagtttagttcgtattttttgttttaatgatttttttttttgttttatttaattaaaatcgaagaggggggttgggggagataattagggaggtttttagtcgttgtttaatgagttagtaattaattagtcggggaggggagttggtttttggttagattggggagagaaaaggtttttggttttatttttttattttttatttcgtttgggttttttagatattagtttgtagtttagaggggaattatatttatttatataattaaaatattagatagatttagtagtagtggggagggagggtgggtagggttgaaggtttatttatagttcgtaaattttttagttttagggatcgggggtgttggtagtgggattgggagaatagttttaattttttaggtgtttatttattttttttttttattgggaggaagggtagagttgttttttaggttataattttttaggtggaggtttgagtttttagattttattgtttagtagtttgataattggtggtgtttttataagttagggaaaagatttttagttattttttgagatgggtgtttgggattttttttattgttttaagtttttatggatttgtgggcggggagttaaatttttgttttatttcgtttgtttttagagtttgaggatttttattttgtttagtttttagggaaggtgatgtgggagatgaatattgagatttgtgtcgtgttttttagtttttggtatttttgttaagtaagagttgagggtatgtaatgggttgtttagttttgagattagtggtaaggaagggttggttggggtttaagttttagtaggtgtgtgtggggggtcgggatttttgtttttttattcgatttttattttgaatttttagtagtaattttaggagtttttgtttttttggagggaggggaggttttgatcgttgggtttttattcgttggtattggaggagtggagggagagggagagttttggtgagggtttgagaggaggaggtttttgagaggattaagggttggtatggggaggtatataggaaatttgtgaaggcgatggggtgtttagggagaaataggagtagagttttaaagagaataggggttaagagattaggaggtttgggtttgttttttggggggatgttttatttggtgattgaggatagtgttgtaaagttgttttttgttttcgagaggacggagtggggtaggggttaggtttgaggggttttggggggtgtagaaggtggttttttgtttttttaggcggcgggattgggttttagttattaggtttagaaggagtttagtttgtagggagagtagggaggtcgagcggggttttagggttggggagaggggtgtggagggtttagagatttagagaggttggtagataggagtcgtgggggagtgtggatagggtgacgtgattagggattttggattagaggagagggggtgtaatggggaattttaaggggagtttggaggaggtggggagagggtttataatggagtgggttttggtaatggggttaggatgtgggtattagggtcggggttttttttgggtgggtaggggtatttgtgtggcgggtttttggaggaggaggggatggaggagtagatcgttaaggtcgagtggtggagtttggagggggttagttttttttattttgaggggggttttgatgttaaaatatgtttattttagttaagtagtggtggttgaagcgggaggagtggatagggggttaggttagtggttcgttttttttttgtgtgtttttgtttttgttttagtttgtttaagttttttaaggtttttgtgtttttatatttttgttttaggtttttttatttttttttttttttagtgttagtttttttaatttcgtgtttagtttatttgtttattatttttttttttttggggttttttagtttttattttttagaggggagaaattggtgggggaggggtggttgggatttgggaggagggttggaattttgggtttttgaggggagtgggggttggaaggggtgggggtgagttgggggttggatgtttgggtattgagtaggaagttgggtttttggttagtttttttacgggtttcgtttatttttgttaattttttttattttttttttatttaaatagtttgtttagtttttttcgttttagggtagtattgagattgggaaaaatttttttagttgtaggagtggagggggtttatggtggggaaggatttttggcggttttatttttagagttttagtagttttttaatttttggttttgttttttttattttatttttttttttgttttttttgttaatataggaattagttatataggaagtggttttattttttagaatttttttttttttagttaggttttttttttttttaagatagattttggtgtaggatttggttttttcgatttttttttttatttatcgggattgggaggggtatggttttagtgggaagtggaggatttagatttagggatgtggagtttttaaatatatatataaaattttagtatcgggtttaatatatagtaagtatttaatatatatgtattgaataattatttttgatttttaggtatttaaaatttatttaggagatggtcggttgcggtggtttatatttgtaattttagtattttgggaggttgaggcgggtggattgtttgagtttaggagttggagattagtttggggaatatggtgaaattttatttttattaaaatataaaaaattagttgggcgtggttatatgcgtttgtaattttagttatttaggaggttgaggtaggagaattgtttgaattcgggaggcggaggttgcggtgaattgagattgtgttattgcgttttagtttaggtgatagagcgagatttcgtttttaaaataaaataaaataaaaaatatattttatttaggagataagatgtgtattaaatagagtacgggaagggtttattttggaaatttatagtttagtgtagataaggggtaggggaaagtttattttgggtataagagatatagatatggaaaaatgagaggttgaggtaggaagattgtttgagtttaggaggttgtggttgtagtgagttatttgtgttattgtattttaggttgggtaatagagtaatattttgttttagaaaaagaaagaaatgaaatgaaattgaaaagggagaggattatttttttggtttggtttttgattaatgttaattaggttggttggtattaaggaaggagtagggtagataattatttggtatttttaaatggtaatttgttatgttagggagtttatagttgagtgatttggaatgtgaaatgtgatgaagagatttggttttgtcgtttattttttgtaattttgggtagatttttgtgttttaatttttgagtgaaatagggttttaatagtatttattttatagggttgatgtattaataatgtaataaagtatttgatgtatagtgaatatttaataaattgtagatattattggtttttaaaatgttttatgattttatgttttaaatttagtaatatattgttgtaaggtggataaagttttaagatattttttttatttatttgatttgtggttttaggaattttttaagtggttataagtaaaagttttaggatgagggataaagtgtgtgtattatttagtgtagtggttttttatttttttggtattagggaagagtttcgtggaagataattattttatggtcggtggcgacggagggttggttttaggatgaaattgttttattttagattattaggtattagattttcgtaagaagcgagaaatttagattttttgtatgtatagtttataatagggttcgagtttttatgagaatttaatgtttatgttgatttgataggaggtggagtttgggtagtaatgtttgtttattttttgttgtgtggtttagtttttaagaggttatggattagtattagtttgtggtttaagggttggggatttttgatttagtgtgtgcggttttttttttggttattagatttttgtttttagataatattttaaattattatagggtttttaaatatatttatttttgtttttaaattatatttatattttttatttaatttaaatgttgagttaaaagtataaaatgttgatattatgtagttatttttatttttttttttatttttttttttaatttttttaaaaaaaggtaatattttaaattagttttattatgggtgatagatttagggtttttaaatagcgatagtagtggttagaagaagcgttttatttttatagtggagttttttgttgtgaggggagggaatgtaaggagttattagcgggggtggtttttggttattttttagtatttatatagtgtttggtatatagtaggtgtttaataaatatttgttagttatttgtgggtagtggggataatggattataggggtattttttggaaattatatataggaaagaatattttatattttatatgtttgtaatttttggttttaatttaggggtatttttattttattttgtttttttgtggtttgttttattttttggaggaggattgggtttgttttattttagtattttaaattttttttttagagttgtagtttttttacgtggaagatgtttgttttggtgggtatatatttattttaggagagaaattaaatttataattttttattttgggggatttattttaaaattaggaaggttttttagtttgttttttaatgggtaattatttttggaatttttttttattatgtatttttttattttttatttttttttttttggtttatgggtattttttggagggttgggggattatagttaagttgaggtgattttcgtttcggggacggagtaaggtaaggaggcgggatcggaatgttggaggtagaatcgtaagtttttagggttatttaattatagggttagttattcgttgagattttgttttcgcgttcggtagttatttcgtatttttttcgtattatcgtagggttgggtcgaggttcgcgtatgtttgtagaaaatttacggtcgcgaggggtcgggtttttttttgtttttattttcgagaggtttcggtaatgagaataggtttcgttttttcgcgtagttaagtttacggattaagttcgagtttgtagataagtttcgtttttacgagggtttgtttcggttgatagcgttcggtagcgcggtagagtttcgtttttatgcgggggtacgtttattgatatcgttcgtgcgcgcgggaagggtttagtttcgcggttcggcgtggttttgtgacgggtttttggtggtttagttttttttagtagcgttagtagattttagtggttacgttggtgagcgacgttcgtcggcgttagtttagtttggtttcgtagttttcgggttgtttttagttttagtagtagttgggttatttttatcgttttttttcgcgtcgttaggaatagcggcgtttgtttttgtatagaagagttagggtcgatattagggaaggttacgtttataggattgggtttttttgtttttatttgcgcgattattggtttttatttttttaggttttgcgggttatcgtattttttatttttcgtgcgtttgattgttttgtgggaagttttttgttttatttaattttgttgttttgggtatttttatcggtttcggtttggagaagcgagcgggcggttcgggcgttgtttacggtagtagtttagtgtagcgtagttttttttaggggacgacgtgggaggttgttattttagttgggggttagacgtttgggtttcggttttttacgggttttggttttgggggaagggttattcgggtcggttggttttttaaaggcgggaagcgttgtttaggagattatcggtttgtaggaagtgttgttttggtgacgttattagtgcgcgggagggataatggggtattgttttggggtcggtgagatcgggagatagtttttttttacgagatttttttttttttttatagatattgtgttttatgttagttttttagtaagttggagcggagggttagtgtggtgttgagggtgggagttggggggggaaatttacgcggttcgtatttttatcgtattttagattgatcgtcgtaatagtaggatgagagggaatgtttttttgttgtatttatattttgtacgttattttttattttatttgtttaatttttttatagtatatattatttttttttttatatattttatttatttttggtttttacgtttgtttgggttgtaattagttttttaattaggttttttatcgttagtttggtagttagtattaagggtgtggtttcgttttttgtgcgagcgtttattgtagtttgtttgttacggagtagaagttggggagatagagggttagtgatttttggggtattttggattgttaattcgagttttttatattattaattttattcgtaatttatatttagttatttttcgtagtttttttgttaggtttttaattatattaattttttttttgttaaattttaggggatgtttttgtttagttttatttgtaagttcgttttattttttgtagggattttagtgtgtgttaatttggtagatttttcgagtattagtagttatagtagtatgaaggggtgtgcgttttgttcggtttggttggttggggttggttttagttttaaggaggcggcgggtagcggttggtcgggagaatcgggtagttaggtgtaggggggtttttttagtgtttacggtgtgagtttggggataggtttttttatttagtagaggtttttagggtttaggatattttaattatgttttttggaaggtttcggattgtatttttttatagtaaattgttgatattaggggtgttattttatttgttggtaagatagagtaatgggttaatttaaaggatataataagggggaagggataatatgtaagtttagagagaattaaaatttgaggtgttgggaagttaagttttggttttgtgtggttttagttaagtgatttttttgtttttttttgattttagtttttttttttgtaaaaggaatttgtagtttaattttttgatattttagggtagtggtttttttttttttttttttttttttttgagacggagtttcgttttgttatttaggttggagtgtagtggcgcgatttcggtttattgtaagtttttttttttaggtttacgttatttttttgttttagtttttagagtagttgggattataggttttcgttattacgttcggttaattttttgtatttttagtagagacggggttttattgtgttagttaggatggtttcgattttttgattttgtgatttattcgttttggttttttaaagtgttgggattataggcgtgagttattacgttcggtttagtagtggtttttttaaacgagtttggattagatttatttgaagggtttgttaaaatagattgtttaatattttaaatttttgagttagtagttttgtagtggagtttaataatttgtatttttgataaatttttaggtgatgttgattttgttgtttgaggattatattttgagaattattgttttaaggtatttagtttaaaattattttttttagttttgatattaaaggattttttgattttaatagggttaaaggatttttttttttttttttggtttgggttgatttatatattaggtttacgggtgtttaggttaggggtttttattttagatttttggggaggagttagtatggttgtttgagggagcgttttatagttattatttagagattagagttggtacgtggagggtgggtttgtttttttagtttttgggtaatagtaaggattagtgaaggttgatttgtttttttattttttttattatttttagattatttttgttttagtttttttatttggtttattttttttttttttttagggtttgagtatattataattttatttttattaatttttgtttttggttttagtgttttggaaaggaatgggtgggtagaggttatacggaattatgattattagggtttttaaaatttttagtaggttttttattttttttttttttttttatttttgatttttgtaatagtattttttattttttttgattgtaaatatcgttataggagagatttttttttttgagtttgggtttttttttatttttatttgagattaatgttgttttcgtttagtgggggtcggcgtcggtggggagttgattgagttcgaggtcgtcgagtgaaattagggggtagttagagagttttatgttttcggcgtcgacgtcggatgagttggaggacgagaagagtttttagggttaggagaattatttcggttattggggagtatagtataggttagggaagttggttggtagggggtgttggtgggagagatagagttataaagagaggttatttttggtgagattgattattattgggagatttttggataagtttagtagtttgtttttgtttcggtttttttatttgtaaaatggggatgataatatagattgaggttgggtatagtggtttatgtttgtaattttagtattttgggaagttgaggtaggtggattatatgaggttaggagttcgagattagtttggttaatatggtaaaattttttttttattaaaaatataaaaattagtggttgggtgtagtggtttatttttataattttagtattttgggaggttgaggtaggtggattatgaggttaggagatcgagattattttggttaatatggtgaaattttgtttttattaaaaatataaaaaattagttaggtgtggtggcgggtatttgtagttttagttatttgggaggttgaggtaggagaatggcgtgaatttgggaggtggagtttgtagtgagtcgagatcgcgttattgtatttcggtttgggcgataaggtaagattttgttttaaataaaataaaataaaataaaaataaaaaaaattattagggtatggtggtatgttattgtaattttagttatttagtagtttgaagtaagagaattgtttaaatttaggaggtagaggttgtagtgagttgagatggcgttattgtattttagtgtggttgatagagtaagattgttttagaaaataaatatataaaaaaaggttgagtatttataattttaattttaaatttgaaatgttttaaagtttgaaatttttagagtattaatataacgtttaaaggaaatgtttattgtagtatttggatgttgtattagggatgttgaattagtaagtataatgtaaatattttaaaataaattcgaaatttgaaatatttttgtttttaagtattttagataagggatatttaattagtagtacgtgttttatggggttgtgggggaggattaaatgaggtaataatgtaaaatgtttagagtaaggtataaagtacgatatagtagttatttttttttttttttttttgagatggagtttttttttgtcgtttaggttggagtgtagtggcgcgatttcggtttattgtaagttttattttttaggtttacgttatttttttgttttagttttttgagtagttgagattataagtattcgttattatagtcggttaatttttttatttttagtagagatagggttttatcgtattagttaggatggttttaattttttgatttcgtgatttatttgttttggttttttaacgtgttgggattataggtatgagttattgcgtttagtttattatttttttatgtattatgaattgtttgatataaagattattaggtatttttagtttggtagagaagataaattatttttttgttggagggttatgatagaggttaggataatgtgtttagggaaataaggaaggagattgtagaataaatgggttagtgggagatttagttagagaaagcggggttagggaaagtaagtttttataaagaatatttttagttttagttgttttgtttgatttagtttttattgtttgttgttagtatgagagttggtttgggaatagaggttagagaaagtggtaaggggttatttatcggtttttgtatgagggtggatagttagtagtggtttaggtagtaggggttttagggtttttattgtagttatcgtagtaaggaagcggagtagaagtttagggttttagggatagcgggatgtcgggtggttagggttatagcgggataaatttatatttatgattattataaatttgtagaggaggtattttagagatttttgtattggtttttggtttttttttttttttttgtttttttaaaaaaattggtgtttggtttttttttttatttagttttttatttagtattgagggagtcggtttttttgtttaggggttgtgtttgaggggttgtttttttttgataggtggggtttcgagttttttttagtttttttttagttcgggttttaggataggggtatattatgtttttgttattacgatttttttttatttagagttttatttttagagttagggatagtattcgggttagggtaaatagttgttggtttagggttggggggtttagtattattagtagggttagggagggtttttattttgggtttttatttttaggtttgtagttatttttattttagttatattttgtagtgttgtagttttttttatagtgttcgttgtggaagtgattatggtagtattggttataggttggattgtggggtaaggagagggggatttaggatttttttaaaatttgatttttttttttattttagaaagaattttttatattttgtgttttttagggttttggttgttaagtgggggtagttgtggagtaatgagtttagttaagttttggatggtagtttagatattttaatgtttgttaatatttttgtttttttagattgttttttttttgtatttttttaagtttttttttgtttttaaaggagagttttaggtttttttttttttgtgaggtgttgattgttaggggaaatattttatggtagtaaggtttagggaaggaggtttgagatttgagtttttttaatttttagagaggagtttaaaggttacgttttatattaaatattgatgttattttattattttaggttggagtttagagttttcgatttttgtttagtgatggttattagggtggaaattttttggagtttaaggttgtggttatattgtaatttagagttatttacgtttttttttttttttttatttatttttttttttttttggttttagtggattttaggtttacgtgtaggttggaggggttttatagtcgtagttattaaatagatattttttagagttatattgtgggtggtattgttcgtttcggaagagaagttagtatcgagagtgggaggggtagtttttttaggggtttgggatttttagagagtagttttttttattttagttttttttcgggttattgtagttagtatcgtaggttttatttttatttttgtttttatattttttggtttcgggtttttgatatcggggttttggagagttgtgagggtaggagtatcgaaagtttgggttttttaagttcgtggtttttgagtagttgttattgtataggtatggggagggagggttatagtttttaggagttggtggggttaggtagttaggatttttatagttattgaggtaggtatagcgtggtgggaagtttggtttaggggagggtagatataggttttcgtggtggtagtgatggaagtcgtaggaaggggttttgtggttgtaggtggggtttttaaaattttgtggaggggaggggagatattggagatgtaatttgtattatttttttcgttttttattaagtaaatttttgggttaagacggtgtagagggttttagatttttatatttaaaaggcgttttagagagtattaagttaattattttgtggatgttgaaattatgttttgtggtaattttatataatgatatattatattttgttgaaaatggatgaagtatagttgtgtgtaataatttgatggattgtggtattatagtgtaagttttagaagattaaatagttaatagaatgttattatattattattattattatttttgagatagagtttcgtttttgttgtttaggttggagtgtaatggtgtaattttagtttattgtaatttttgtttttcgggtttaagtaatttttttgttttagtttttttaatagttgggattatagttatgtattattacgtttagttaatttgtatttttagtagagatagggtttttttatgtttgttaggttggtttcgaatgttcgattttaggtgattcgtttgtttcggttttttaaagtgttgggattataggcgtgagttattgtgttcggtcggttgttatattattattttattttttagaaataggattatatgtttttttttttttttggagagggaataggatataggaggaggatttaagtagatgtaagttattattaatattgaaatttttgggttaggtttatgggtgttatattgttagaataataaaataaaagaagattaggtataaattaatgttagtgtattaggaattaaagtttaagattagtttaattttatgtatttgaggtttataaatatatatataaatatatatagagttaaaataatttatttgaggttatttattacgtagtttgagtttggggagtttttgatttttttttaggtaacgtttgtgatttttgaaaattttatttatgttattaattgattttgttttgtttttgattgtttttgagagatattttttattgtgagtttggtatggttttttttaataatttttatattagtgtttatttatagttttttttgggattttaattgaggtatttttgttttgttagtatagggggtaatagagaaggtagatttgtggttatttgttttggggtagtggtagatgaaatttaggggtgattttgttgtggttttataggtttttttatgaaagtagggttggttgtggtaggggtttatttttattttatattattggtttgtaattatgggggagattagatgttatatattgtattagttattgtttttattttagtttatttttggatgttggtttagtgttagatgtgtaggtgaagggattttggggtattttttttgggcgggggtgggcgtggaggtaggggatggattaggtgacggttgtcgtatgggtggagattatttggttttttatggtttgtttggttgtgttttagatatatttgtgttttttgttttggggttttatttgtgtgtttaggtagatattggtagtagaaggtattggttagagagtggtaggttgtagtgtttgtggggtggtagggttggtttagatattcgtttacgttttttttatagcgtagttttataaagtttggagggtaggtatagtggaagtttttaggtttgggagtataggttttatggttgtgatagggttgggattgataagtatcgagtttttttgagtagttttgtttatcgtagtttggggtatattgtagataaagaggattagatagggaattagtggatgagtttaatttagtattataagggatttagtttaagatagtttgtttagttttttattttttagtttaatagtattatttaatttattatttattatggttatgtgttataatttttttattttaattttttatgagatataattgttggcgatatataatttaaatttttttagttttaaataatttttatgatatattgttattaaatatagtattatttttggtaaaattttttttttttgttaaatatttattaggtttttttatattttattaatttataagtatttattgagtgtttattttgtgttaggtatcgttttaggtattaggaatataaagaaagttagaatttatttttattttttggaagtttttagttaattagaggaaagaaatgattagtatttattgtatgatttatatatataatttaaaaatttttttaatgatattttatttgggttattttattcgatttttattttgtacgtaaggaagttgagtttttgaaaggttagtgatttgtgtaagttaaatagttataggtggtagagttgggaattaatgaaggtttgtgattttaaattaatgtttttaattattttttgtttttttatgttatttagttagtgagagaagggttattggtaagatttgtattacgtgttggttttttgtaagaggaaagagagtgtgtaagagtatagtattaggaaggtaggttttaaagagagaaaagggaatttatagagaatttaaggagtggttagagagttggaaggaataggtgatgggggtgttttggaggagggagttttataaaagaagaagtaaatagtcgggtgcggtggtttacgtttgtaattttagtattttggtaggttgaggtgggtagattacgaggttaggagttcgagattagtttggttaatatggtgaaattttatttttattataaatataaaaattagtcgggtatggtggtatgtttttgtagttttagttatttaggaggttgaggtaggagaatcgtttgaattcgggaggcggaggttgtagtgaatcgagatcgcgttattgtattttagtcggggtaatagagtgagatgttgttttaaaaaaaaaaaaaaaaaaaaaaaaaaagaataagtaaagttgagtaatgggtgtttagaggtttattattgattagtatattgtttttgtttatgtttgaaaatgtttataataaaaggttaaaaaataaaataaaaaagtgaaaaaagagggtaggttagggtatttgttttgagttttttattaaaagttgtggttttggtcgggtacggtggtttacgtttgtaattttagtagtttgggaggttaaggcgggtggattatttgaggttaggattttgagattagtttggttaatatggtgaaattttatttttattaaaaatatatatatatataaaattagttaggtgtggtggtaggtatttgtaattttagttattggggaggttgaggtaggtgaattgtttgagttcgggaggtagaggttgtagtgagttgagattgtattattatattttagtttgagtgatagagtaagattttgttttaaaaaaaaaaagttgtggttttatattttaaaataataaaagttatatatgataaatttatagttaatattatattgaatggggaaaagttgaaagttttttttttaagatttggaataagataaggatgtttatttttattatttttatttaaggtaatattggaagttttggttagagtaattaggtaggagaaagaaataaagggtatttaaattgtaaaagaagaatttaaattatttatgtttatagatgatataattttatatttagaaaaatttaaagaaaatattggttataaataaatttagtaaagttgtaggatataaaattaatgtagaaaaagtagtagtatttttatacgttaatagtaaataattagaaaaagaaattaagaaagtaattttatttataatagttataaaaaataaaaataaatgaataaatttaattaaagaagtgaaagagtattgtaatgatagttataaaatattgatgaaataaattgaagaggatataaaaaaatggaaagatattttgtgtttatggattggaagaatgaatattgttaaaatgtttgtgtttattaaagtgatttatagagttatgtaatttttatgaaaatattaataatattttttatagaaatagaaaaaataattttaaaatttatttgaattgtaaaagatttaaatagttaaagtagttttgagtaaaaagaataaagttagaggtattatattatttaatttaaaaatatattataaagttatagtaattaaaatagtatggtgttggtataaaaaatagatatatagattaatggaatgtaatagagagtttagaaaaataagtttaaatatttaatagttaatttatttttttttttttttttttttttttttttttttttgagatggagttttgttttgttgttaggtcggagtgtaatggtacgatttggtttattgtaatttttattttttgggtttaagcgatttttttgttttagttttttgagtagttgggattataggtgcgtattattatgtttggttaatttttgtatttttagtagagacgggggttttattatgttggttaggttggtttcgaatttttgattttgtgatttgtttatttcggttttttaaaatgttgggattataggtatgagttattattttcggttagttaatttatttttaataaaggtattaagtatatatattggggaaaggatattttttttaataaattgtgttgggaaaattggatatttatatgtagaagaaattaaatttaggtcgggcggggtggtttacgtttgtaattttagtattttgggaggcggaggtgggtggattatttgaggttaggagtttgaaattagtttgattaatatggtgaaattttatttttattaaaattataaaaattagtcgggcgtagtggtgtgtatttgtagttttagttatttaggaggttgaggtaggagaattagttgaatttgggaggtggaggttgtagtgagttgagattatattattgtattttagattgggtaatagggtaatagagtaagattttatttttttttttaaaaaaaaagaaaaaaagaaattaaatttttatttgttattatatataaaatagattaaagttttatatgtatagttggaaatttgaagttattaaaaaaaaaatttagtcgggtacggtgggttatatttgtaatttttaaatataaggttaggagtttgagattagtttggttaatatggtgaaatttcgtttttattaaaaatataaaaaaatagttgggcgtggtggtgggtatttgtaaattttagttatttgggaggttaaggtaggagaatcgtttgaatttaggaggtaaaggttgtagtgagttaaatttgcgttattgtattttagtttaggcgacggtgtaagatttttttttaaaaaaaaaaaaaaaaaaaattatttgggaaatgttttaagatattggtttgggtaaaagttttttgggtaagattttaatagttaggtaataaaggtaataatagataaatgtgattatattaagttaaaaagtgtttgtgtagtaaaggaaataattaatggagtgaagaggtaatttatagaatagaagaaaatatttgtaaattgtttgataagggattaataattagaacgtataaggaatttaatagtaaatattattattattattatcgataaataatgtggtttaaaaaatgagtaaattatttgaatagatattttttaaaagaagatatataaatggttaataggtatatggatgtaaattagggaaatgtaaattaaaattataatgagatattattttatattagttaaagtggttattattgaaaatataagggttaagtgtggtggtttatgtttgtaattttagtatttttagaggttgaggcgggaagattatttgaggttaggagttcgagattattttggttaatatggtgaaattttatttttattaaaaatataaaaaattagttaagtatggtggtttacgtttgtgattttagttatttgggaggttgaagtataagaatcgtttgaatttgggaggtagaggttgtagtgagttgagattaagttattgtgatttagtttgggtaatatagtaagattttgttttagaaaaggaaaaaaaatgtaaaaaatagtagatgttggtaaggatgtagagaaaggggaatttttatatattgttggtgggaatgtaaattaatatagttagtatggagaaaagtatggaagttttttaaaaattaaaaatagatttattatgtgattaatttattgtttattatatatttaaaggaaattagtattttgaagagatatttgtatttttatatttattgtagtattgtttataatagttaatatatggaattaattgaagtgttattaataaatgaatggaaaaaagaaattgtgttatatagatataatggaatattatttagttagaaaaagaatgaaattttattatttttagtaatatggatgaaattgaaggatattatgttaagtgaaataagttaggtacggaaagataaatattgtatgttttttatttttatttttgtgttattgttttagttagttttgattttttttgtattttaggtagatatttgtattagttttttattgtatgtgtaatattgttttttatttatatgtgggagttaaaaaagttagttttatggaagtagggtagaatgatggttattagaggttagaaagggtggtagggagggggagatgaagagaggttggttaatggatataaaattatggttatatagaaggaataagttttagtgttagatagtagagaaggatggtgatagttaataatttgtattttaaaataattagaagagaagatttgaaatgtttttaatataaagaaatgatgtttgagatgatagatattttaattattttgatttgattatgatatattgtatgtatgtattaaaatattatatgtgtttaggtgcggtggtttatatttgtaattttattattttggtaggttgagcgggtggattattttaggttaggagttttgagattagtttgtttaatatggtgaaattttatttttattaaaaatataaaaattagttaggcgtggtggcgcgtttttgtaattttagttattcgggaggttgagatatgagaattgtttgaatttgggaggcgggggttttagtgagttaagattatgttattgttttttagtttgggggatagagcgattttgtttttaaaaacgagagagaaaaaaaaaaagaaattaaaaaatttatatgtattttatagatacgtatgattatcgtttgttaataataaaagaaaataaaatggtaattatatatataaaaaagttgtggttttgagtatatgaattaggttgtttagatttgaatgttagttttgttttttttggtttagtgatttggattataaagaagaggttttaatttagtttggggagaagttagggatatttttttgaagaagatgttttttgaatattagtttgtggaagaggggttgggaaggttattttaggtagtgttaatagtagggataaaggttgagaggtaagaattagtatggggtacgtggtaaagttagtagtagttttatgttgttggagtagagagtagaagggtgggatggggagagttgaggtttgagaggtaggtagggttgggttatgtaggttttggattttatttagaatgaggcgggtagttttcgaaggtttagtaggggagagataggttaattggatatttttagtagagtattttggttacggggtaaaggttgaatttatagaaggataagtgtggaggtagagattgtagttaggaggttgatgtaagtatttatttggaacgtaataaaggttaggatttaggtagtgggataaagggtgaaggtgaaagtatagatttgagaaaattttaggagataaagtggtatgattttgtggttagttgggtgtgtggggttaaaaaaaataaaaggaggtgaaatggatatattgggtttttttttagttattattgttttttttatttagtttatttttgttttttttttttttttttttgtagatttttttatttggtagagatatttattgggttgggttatgtaggtggtttcgttttggtaaggtttggatttatatgggtttacgtgattttggtataggttgttttggaatttaggggggtagtggtagaaataggaggggtcgttgtcgatatagaggtttttattgtggtaaagggaagagacgtttatgtttggggagagagataaatagggatatataaagataagtggggggtcgggcgttatggtttacgtttgtaattttagtattttgggaggtcgaggtaggtggattattaggttaggagtgtgagattagtttggtaaatatggggaaatttcgtttttattaaaaatataaaaaattggtcgggcgttgtggtaggtatttgtaattttagttatttgggaggttgaggtaggagaattatttgaatttgggtagcgtaggttgtagtgagttaaaatcgtgttattgtattttagtttgggttatagggtaagattttattttaaataaataaataaataaataaataaatagaaacggtaaatggggatgtggtcgggcgtggtggtttatatttgtaattttagtattttgggaggttgagacgggtggattattgaggttaggagttcgagattagtttggttaatataatgaaattttatttttattaaaaatataaaaaaaaaaaaaattagttgggtatggtggtatacgaattttagttatttgggaagttgaggtaggagaattatttgaatttaggaggtgaaggttgtagtgagtcgagatcgtgttattgtattttattttgggtgatagattgggattttattttaaaaataaataaataaataaataaataaataaataaataaataaataaataaggtatgtgaggaggaggaagggtgtatttagggtttaatttttgggtgtagaggtttttattttggggattattaatatttttgggtggagattggtttgggtttaaggagttaataatttttggtattgaagaaattagattatcgagttttatttttttttttattttttttgttagaatattggagatatatttttaaagtttattataatgttaaagtaattgtttttttggtttaaagtaaggtttgagtaagaaataatttaaggtatgttttaagtgaggataagtggtttaagtttgttttttgagttttgtatttttttaatgttttttttttgtgatttttattagttattttttaattttattataatttttttttcgagttttttttatattaaattttattttagtgtttttttataaagagggtggcgtgatatcgaagtgagtggggtggggtgaaatgcgttgagtgtagttggattaagtgtggtttattttgtttgggttatgatgattaggatagagttgagttgttttacgttgagttatgttttttatggttgggttaaattggaattttgtggaatgggttggttggtgttgtttgaattgcgttaaatgaggtaataggaattgtgttaggtttttttgattgtataatttaatatttttgtaattaagaattgatttgtttgtgtggttttgatttttaggtggttgttttggttaaaagttgtgtggaagtttataggaacggggtaggtgagaatatttatattttttttatttgttttttagttagtgtcggtgttggttattttggtttagtgtagttttttggtaggaggatagtggaaggttgtagagaggttcggtttatttttggaggtataagtagtggaaggagggtttagtttggaggtagtgggaattgcgtgggtagggtttttgggtatataagtttattagagtttgaggggtgggagggagcgtgaggtaggatatagtattagatttttagtttagagatggttttttgtttattttagtttttcgaaattttttattttaaaaatttttttttgaatggtttgggattaggtgattttttttggttttttttttagttatttttttttttagtacgtttgattttaatggtttttatttggtagttgttttcggtgtagttagtggggtagaggtagcggggattttgagggttgttttggtaggttgttttatttttataggggttgaataagatagagatagggtatgataggaagaagttcgggtaataaggggaaggtagtgtgtgatattgtcgggaggtaattatagggaggtggtaagttaggagggaaggcggaacgaggtgtggggtgggaggtagtttggaatttagggggagatgagaggaggggtgggaaggttgaggggtttttttttttttaggggtttttgggttttgtttatttgtttgtatagttggggcggagtttttttttatagcgcgggttttggaagtttatggtatagaggtaggagaaggtgttaggtttgtttatataggtatttttattgaagtacggggttggagagaggaggttgtgagggtttgggttttttgtttgtaatttggtttgtgattttagttatattgtatataggatatatattttttatttttattaaaacgatagtttattgttatttaattaatttttatttatatgatattttattatttttagatagggttttgttttgttatttaggtagtggtgttattagagtttattgtagttttaattttttgggtttaagttatttttttattttagttttttaagtatttgagattataggttttagttattgtgtgtttagttaatttagagatggagttttattatgttttttaggttggtttgtttaattaaattttaaaaaatatgatataagtatattttttttagtttttttatttttttgtggattttagttttatgatatagtgggtatttattagatatatagtagttagtgttggtttggtattggggttttgtgtggtttggagggtaggtgtagtagtagtttttagggttagggttgtaggagtcgttattgagatatggttttgagtgataagttgttatttttttattataggtgggttttgaaggaaataggtgggggttgagaaagggtgtttttttttttttttttcgtttttttttttttttttttttttttttttttttatttttaattttattatttttttttattaattttcgtttttattattttttatatattattcgtgttttttgtagtttagttttttttagtggtgattgagatttagggttcgtggtcgtttgttttatttttgatatagggggtgattagtatagggtgtatatggtttagggagggttttatttgtgtagtttgtagggtaggtgtagttgtagttagagggttgggggtagtaggtttttttatgggtatagggtgtagagatgtagttttttagttttgttttatattttggtttcgtttaatttacgttatatatatatgaggatttggttgtaaagagaaaggggagggtttttttttttttttattgtttatgtttttttttttgttgtttggatttttatgattttttttttttttggttttgagattttggtttttttttttagtgattttgtttttagtatcgtttttattttttttaatatttgtttattttttttaattagatatatgtatttatatatttagttggagatatatatatatatatatatatatatatatatatatatatatatatatatatatatatattttttttgtaatttatttattttttgtttttttttagaatgaaagttttacgagagtagttgttttattttttttgttttgtgttttttttagggtttggaatagtagttatataaagtaggtgtttagtagatttttttttttttgagacggagttttgttttgttatttaggttggagtgtagtggtatgattttggttgattgtaattttcgttttttgggtttaagtgattttttcgttttagttttttaagtagttgggattataggtgcgttattatgtttagttaatttttgtatttttagtagttatagggttttattatgttggttaggttgatgttgaattgttgattttaggtgattcgtttatttcggttttttaaagtgttgggattatcggtatgagatcgtaattagtattgcgtttggttttagtagatatttttttaatgaatgattaattcgttttgggatttaatgtttttttttttgttttgattttttggttttttgtttttattagtttttgtggatttttttttttttggataatatttattagttgagtttttttattgttttgttttaagaattttgttatttttttttttttttttattggttattttttatagatttatattttattggttgtttttttttgttttagcgaagggagtttaaaggagggggtagatggggagggtttggaagatgttatttttggtagtgttcgtggtggtaggtgtagttgtttttaggtggggtatagttagggtttttattaggatagaggtagttggttttgtttttttggtttttatatatttgtttgggttggtataggttgggagtatataggggaattttatagagttggtttggggtgggaagatgggttaaaaagaaaatagtttttttatattttttattgggttaaagttatattttttattgggttaaagttattttttatgtttgttttatttattttttatgaatttatgaatttgttttttaatgggtttttattgtttttaagatattgtttaatttttttagaatgatatgtagagttttgtaggatatgatatttgtataatagttgtgttttttatttttgttttgttgtatttttaattttgatttttttatagttttttaaatggggtgggttttttttttatttgtgtttttgtatatgtagttatttttagttaaaatatattatttggtattttatttagatagatttttgattatttatttttttatttttttttttttttttatttttttttttttttttttttttttttttttttttttttttttttttttttttttttttttttttttttttgagatggaattttgttttgttatttaggttggagtgtagtggagtgatttcggtttattgtaattattgttttttaggtttaagcgatttttttgttttagtttttttaatagttgggattgtaggcgttcgttattacgtttggttaatttttgtatttttgtattttttgaggtggagttttattttgttatttaggttggagtgtagtggcgtgattttagtttattgtaagtttcgtttttcgggtttacgttatttttttgttttagtttttggagtagttgggattataggcgttcgttattacgtttagttatttttttgtatttttagttgagatggggttttatcgtgttagttaggatagtgttgattttttgattttatgatttattcgtttcggttttttaaagtgtaatttttgtatttttaatagagacgaggttttattatgttggttaggttgatttcgaatttttaattttaggtgatttattcgtttcggtttttcgaagtgttgggattataggcgtgagttattacgtttagtttttgtttattttttaagatttattttagttattattttttttatttttagtttgggttggttggttttttgtgtttttgtaatattttgtacgttttttttttagagtatttttgtgggttatgattaataggagatttgttggtttttttgtattagatttaaagttatatgaagatggtaattgttttatttagatttgttttcgtatttggtatagtaggcgttggtaagtgtttgttaaataagtaagtgaatgttttttttttgagtttcgttttttgtttttaagtcgtaattatattatttatattgggtttatgtgggttttacggtaatttttgtttttgtttttatggttgtataattatgtaggttttatattaaataattttaaaggatattatttttattttatttttatattttaattattaaatatttattaatgaattttgttttaatttaaatggaataaaatattttgttagttttttttaatgttttttttgtgaatttgtgaaattagaggggtagaggtaaaagaaggtttttggaagattaaggtagttggttttaacgggatatgggttatttaggtatttatttatttttgtttgatagcgtggttttttaaagtttgtggtatagtaggaaggttagggatttgtacggatgtttgttttttgttttcgttgttttttatagtgtgtgttttagtttatttgggagatatttgtagtggaaggttttaggttggttttggtattgtttattattggtatagggagagtttttgtatttatcgatattttttttatatcgggtgtcggagaattttggtggggcggaagtgggtggggagaggaggttaaggttatcgagggaggtatagtatggcgtttttttttgttaggaaaggtgaatttgtagagttttttagagaagatatttggggtaggtgagcgtggggtgataggagatgatgtagaaaaggtgaagtttagttatttgttagttgtgtgattttgggtaagttggttaattttttaggttttagttttttgttttgtgtaaaaggggaataataatggaatttattttatggtattgttaaaaagattaaatgatataacgtttgaaaagtatttagttaaatggttagtttggagtaagtggtgaataagtgtagttattataatagtaggggatagaggagtgttcggtgaggttggagaagaaaggtttggggtagtttttgttgggtttatgatgagagtgttaagattagtttgggattttaatatgtatatatagaggttgtgtaggaggattggaaaggagggatttttgggtgatttggtaggatagagatgagaatgggtaagtaagtaagggaagatttggggatgtaagagtagagattttggggagtaaagatagatttggaggattttttggtttggttagagagagttttaagtggttttgggtgattgttgagtttgaattttgtaggtttagaggtttggggtttgagggtggttagagaggtatttgtatttattaggtaggtagatgtattggaagtcgttgagtaggttatggtaattcgcgtggtttaggtagggagttgaggtatattcgttggtttttattttatagagttgtttttttaagtttggggatatggggattatgagggttgtggtttagttaggtttgtttgggagatttgtgttttagaatcggttttgtttttgatttgttttatttaggcggttttttttcgaggtgttgtttgtatggggttgaataagatgaattttgaggttttgttgtttcgtagtgtgtggttttgttttttgaggtgtgaaaggttagggaatagggtgtttgttggggatttgcgggaggattataaggttttttggtggttatttttgtgtatatagagggcggggtttattagggtaggttgattagttcggaggattttaaggtataaataggaataaattggtttggagaatgagttttattttttgttttttttgggcgggtttttatgttagggagaatagagattttaaagtggaggaatttgaagtgtatttgggaagtttgttgtttttatatttgtttcgttgttttgggtttattttggtttttattgttttattttgaattgaggtgggattaatttttggattttggttttttttttttttttgtttgaggagtttgtttttgaagttttttgatatttataatgttgttttttgggttatcgaatcgtttttttttatttttttatgattgtttgttgggtgatttgagttagtatttttgggtgtcgtttagtttagaaagttaatatggggtagtggttataattgttgaagtttttggtttgaattttagttttgttatttgttagttgggtgattttggataagttatttaaattttttgtgttttagtttttttagttataaaatgggtagtgttgattttatagagttattgtaataagtagatgagataatgtttgtaagatgtttagatagtatttggtataaagttggcgattatttttttgattttatttaattttttgatgttggttttgttgttgtttttttggggcgattttttttttttaaaattagtttggaggtgggtgttgttttgtagtaattttttttttgttgtattaaatttttttgttgtattatagggtttttgggattttaagggattattttgaatttttatatgggagagtttttataattagagggagtattttgggttggtttgagtaaaggttgtagtatagaaagtttatgaattgtttttttatttttttttgttgggttgttgtgtatagtggattaggttgtgtagtttttatgatgattatgaaatgaatggtagtttttttttaagttgaggaatgtataattttattattatttgtggtaattttttttttaggggttttgggtgtttttgagttttcgtttgggggtagagagagaagtatttgtggtaatttacgttaattggtttgaagttgtttttattttggagggggtatttttagtgggtttaggattagttttttgttttttttatttaaggttttatttagttgatatttggcgggtagaggtagtggaaggtggtaagtaggtttagataggtgttttttgggtggtagggttgggagaggtatttattgtgattagttttataacgggagtttgtgtagttaggtggatagaggtagttgaaggagttaggagtgttgaggtaggaatcgttatgtttatagggatttgggttttgttgggttgggaggagagaagagttgggagtttataggggttagggtaggaagggtaaggaggtgagattgttagggaaggtgtgggggtttgcgtgtggtagacgagattaaattggggaaggggtttgtgtttttaagatggaaaggaaataagggattaaatttatggggattgaggggttgaatattggagagagggttatgtaggtaagagatgttaaatttgggtaaatttaaggaaaaagatgtttggttttttaattggaaaagtaatttgtttttttttttgtttttagtgtagaggtttgtttgaggtttagagaggttttgaagtgggagtggttttatttattagatattcgtttaggttttggtggtaggtgggtttcgaatagttaggttgatataggtagagtgtggagtttgtgagggggttggtgttgtattgggtatttttatggtacggttggtttagatatatgttttttaagtggtataggagttttggaggggtaagagggggtgaggtttttaaaggttatttgaagtttttagtagtttttttggtgttttttttattttttttttttattttttattttttgatattttttatttttatatttgtgcgtttaggtgggtagaggtaggagaaagagtttattcggttaatgtaggtggatttcggggtataggtggtagtaatatagttatttaggttttttttatagtttgtgtttttttagttatttatatatacgtagtgaaagttattagtagagttttggtaggtgttttcgtttttgtagtgagggggattttgggttttatatttatttatattttcggagtagttttagtttgtagggggttggggaggggacgagggttaaggttgggagttttatgagtaggggaggttaggggttaattttttgggttatgggtgttatggatgtggtttaaataatttatttgtttaggtttttgggtagaggtaggtgtaggtgtttagtttattttggtaagtgtttttattttgatattggtggttgatatagttgtttggatttattttatagttcgggtttatgaaatttgatagggttatggattagttgtgggaggaggttttaacggagatattttgttttgtttagagagaggggcggtcggagagtttttgtgaggatatatttgggggatagaggtagaggtgaaaggtggagtttttttttggtattagttggtaggtgtttttattcgaatagtttttaggagggtagggttttgttcgtagtttataacgtggatttttttgttttatagggtagaggtattggaaggagtttagggtgttatggtaggaggtgtttttggggtagggttttgggttttggaagtattcgttgatattacgtttataggtatggttttcgaagttcggtgggtagtggtattggatttgggggtacgtggttagatatatttttttattaatatatgggttggttgaatagaagtttcgaagttggtattgtttatttgaggtagaggatagagggagtcgtttttagtattgtacgaattttagtttatttgaggttatttagtgtttattttggattatttttgggttttatttttatatttttttttttttattattatattttttttgttttgttttattatttttgttttgagcgatgttatggtttgggagggtttatttggagtgattatattttttaaagtgatgatgagagtattgtaaattggttttgtttgagaaaatttgggacgtgggtgattttgggggaggtgaaaagtattttacgtttgtaggtaggagatttaggtggtattatgttgtgttataattggttgtatatttttgggtgagttattttgtttttttgaattttattttttaatttttaagtgggtttaggtatttggagatttattttatagtttatgtgtattagtggtaatggcggtagtagtggaggtgttaggtgttgagttgagtaagtattttttgagtatcggttttttttgtttttttagtaattttatgaagtgtgattattattttttttgtttgttagttgataattgaatattagaaagttaaaatattttatatgaggttatgtagttgattagtggtagagttagtatttggatttaggggttggtgtagagtttttagaatgaagtattaagtttgttttagggttatatttttttttttggggcggtttttaatttattttttgggttatattttttttttttcggtgttttttttattattgtagtttttttaggtgatataatggttttttttatttagaatgggagttatttagatgtttagaatgtaaaagtttggaggatttttggtatgtagagtaatgatttttttttagttgttaggtaatggggagattaaaggggttaggataggtattaggatggtgtataaagggggtttatggtatttttaatttggaaatattttaatattttagtaattagtataattatgttggtgaatgttggttgtgggtaagtggattgttaagaattggtatgttgatttttatggtttttgtttttaaagggtttgtagttttttaggttttagttttattttttttatttatagtttagtttattgtttttgtttgtttttttttggttgtttttagtagcgtttatttgtttatttaggtatgtaggagtattgtgggcggttcgaggtttggatgtggtagcggttttttttggaatagaaggagggaggataagggtttttaagtttggtttggtatttttcgttagtgaagttagggaggtaagtgtataagaagttgggtgttaatggagagggagagttggggagttttaggggagcgggaagtagggtttggtagttgtttttattttggtagagttgggcgttttggtaggggttaggaaattggtacgttttatttaggaagttaggggtatatttgggtaggggaggagaggaaaatttatattattggtttttttttttatttttgtttatttttttttttgtttttatttgtttttttttattttttttatttttttttttttttttttggttttatttttttatttttttttttttgttttttttttttttttttttttagttttttatttttgtaaggtatatttattggtaggttttttgttttagagataggtttaggtaggtgtttttattggtatagggttttgggaaatttttatatagtagttttgagggaggagaggtaggcgtaatggaagttttgggtgttgtgtttttatttttttttttttaggtgtttttgagagatttgtttatagtagtttttataggtattttaaattattttttttttatatttgtttttattttttatatggtatttagttttagttttagtgtttttcgttttagttattaatttttattttttttttttgtttattttttggttttttaagtttagtttcggattttatttttcggaagtaagataataggggttagaagaggggcggaggtggttttcgggaggtgaatggttgagatttcgaagagattttttttcggaaaggtcgagtattgagttattcggggggtggggatagttggattaagaaagggtttagtaggtttgattttttatgtttttattttttgttttttttttattttttttttaagtaggtggttagtgtgtttttttttttttttttttttatggttgtaagagttttttagtgttagtgttgacgaggttttttttggaggtgggtatttttttatttattttttagtagttattatttttggtattaggtttaaagtagttttatgggtagagtcgtttttttttggaggtcgtttttatttgggtagtgagaattttttttatttagtattttttatacggtttggggtttggttttttttttttattttattgaatatttttttaagggagttgggtttttttattttatttacgttatgttttatttttgggtttgattattgagatatatagtagtagtagtagtagtagtagtagtagtgaagggggttgtattttatagttttttttttaagttttagtttttgtttttttttaggtagggatttttagagtttttattggggtaggagttattttttttgtttttattgtttttttttttttttttcggtttgttgtaagttttacgtttgagttgttttttgagttatataatgttttggatattttagtaatggggggcggaggaagagtggaggaatattaggggggatgaaggaggggttttttgtttttgataatttttggggaagtagggggaagtaggacggtgtgtttggagggtaggtgataggaggggagaaggaatttcggaattttttgggtagttttagttttgttgtttgttgatttggttttttttttttagggatgagaattgtaaggtggttgtcgtgtgttttaggaggggtaggatttggaaataggtattgggtggttatagagttttgtatttttttttttaggagaggatgtttaatttgttaggttattatagatgttttttagagaatttgtaatttgttataatttgaaattatttattttggttaaaggaatttaggggtttttgggttttattttggtttttgttaggatttatttttttttttttggcgaatgggtaagatgttggtcggttttggggaaattttggtttttttgttgtaggggaatgttaagattgttattattagtgataaatgaatatagtttattttaaattttgtagtttgaattgtttgtaataaatattgaatttgggtagtttttattttttttatttttgttttttttcgttgttaaggtttttgggatgtagggaatgttagttagaatgtaaaattggagttaataaaattataaaagagaattttttgttttagaatgtttattttatttttttgagttaatttaggataattttggggttaattatatattgagtttttttagtagtatagggaattgagagtttagggtggtagaaggtgttagtggtagttgtgttttttttggtgttgaggtatttatggttgttgttggtgtatttgagagtttttttttatcggggaatatattttattagtattattttttttttttttttagttttttattttaaaatatttttaattttatgggaaaggggtaaaaatattaaaaagaattttaggatattttttatttagatttatttattaatattatttgattatatttattttattattatttttttataaatatatatttgtattttttattgaattatttgagagtaagttgtatataagatattttttatttttaaatttattagtgtaaattttttaagaataaaatatttttttatataatatagtataattatttaaattaggaaatttagatcgatgtaatattatgatttaattgatagtttaaatttaggttttgttaattgttttataatgttttttatgataatttttttttttggtttaggattttatttggtattttgcgttgtatttagttgtcgagtttttttagttttttttaatatgagtatagtattttaaatgtattttgttttttattatattgattttttttttttttttttttgagatagtttaggttggattgtagtggtacgattttggtttattgtaatttttatcgtttgggtttaagtaattttcgtgttttagttttttgagtagttggaattataggcgtttattattacgtttggttgattttttgtattttagtagagatagggttttattatggtgtttaggttggttttaaatttttgagtttaggtaatttatttattttggttttttaaagtgttgggattataggcgtgagttatcgtatttggtcgatattggtatttttaagtatataggatagttgttttgtagattgtttttaaatttgagtatgtttggtgtttatgtatttttgggtataagtattagtgtattatatttggaagttcgtgagttagtattatttataatggttatttagtattttattagtttatttaaattaattttttattatagtatgtttaggtgggttttaatttgttttttgtttttttagagatagggttttgttttgttatttaggttggagtgtagtggtacgtatatagtttattataattttgaatttttgggtttatagtaattttttttttcggttttttaaagttttgggattataggtgtgtattattatatttggtttttaatttttaaatatataataaattgagttgtggtaaatattttttttttttttttttttttttttttttttttttttttttgagatggagttttattttgttgtttaggatggagtgtagtggtgtgatttcggtttacggtaatttttgttttttgggtttaagttatttttgttttagttttttgagtagttgggattataggtatatgtttggttgatttttgtatttttagtagagacggggttttattatgttatttaggttggtttcgaatttttgattttaggtaatttgattatttttttcggttttttaaagtgttaggattataggtgtgagttatcgcgtttagattttcggtaaatatttttgaatttatatatttgtatggttaattattgttttaggttaaattttagaagtgaaaattttgagtgaaagggtgaagatatagatttgttttaaagtttttggtttttatgtgttgttaagttattttttagaaagtagtgaggtttttttattttagttagtagtgtttgtttgtgtttttattttcgttaattttttatattagaattttcgttattttgatagatgaaatggttttttattgtttttttaaattgtatatttgttgttaagtgttaatattttttttaattgtttaatggttattcgtgttttttgtttatgtttttgtgagttttttgtttatgtttttgttttattgttttattggtgttattgttatttttttattattttttttagttgaggaggtaattgtgggtatggggaagaggaattttagtgtaaaagtttttgtttttgtattttttggtttgttgattggggatttggtgttggtgagtagtgaaaggaaaataggaagagataataggttttttatggaatcgcgaagattttggtggaaagaattgaatttattatttttgtaatgttgataatttaatattatttgtggaaaaggaggttggggtattaggttggagtatgagaaaaaggagaaattgtaacggagatagagaggtggttaggtggaagggaattagaagtgtggtgggtagaagttgagtttaaagatagtgttaggaagttgtttgtttattttttgttttattttgtttaaggtaaggtagtgtgtatttgtttaggtattatgagttatgtttgggttttagatattttttttggtttttaagattttatagtttaaagtagtattgatgtttttttaagagtttgttttttttttttaatggttttttaagggttgatattgattagggtggtattattattattatagtgaattgtagtatgttagggatatagatagttttttttgggaaatgatttttttttttatagtattttattaaatagagatttattttattaaagggatttttttttattgtatattttttgagaaggataaatttgttagttatttatattttagttatagggatttgtgattttaaaaggtgaatttcgaggttggttttgataatgtgtttaaatataaagaaggtaataggttattgtagttatagagataagtaagagtgttaggtgtagcggtggtttatgtttgtatttttagtattttgggaggttaaggtgggagaattatttgattttaggagtttaagattagtttgggtaatatagggaaattttatttttatgaaaaaatataaaaattagtaggtcgtggtgatgtatattcgttgttttagttatttgggaggttgacgtgggaggattatttgagtttaggaggttgaggttataacgagttataattatgttattgtaatttagttagggtgataaggtgagattagagtgagaaaaaaaaaaaaataagaaataagtaagagtaatttatttttggagattatttgtaaatatatggttcgggagatatggagtttttcgttgttttaggtttttttttttttgtttttttgttggttattttttatttcgttaattttttattattgtagtgtttatggttattttttgggttttttttagttttttgtttttttaggtgattttatttagttttttggttttttattagatttagatattatttatgaagattatttttgtgttgatgatttttaagattatatatttttcggaattttagatttgtatttttaagtataagtattataaatttaatatgtttagaattgatttgatttttttttttaattttttttttttttttgatagaattgagttttgtagttttattttttttattgtttaggtttaaatttttgaagatattgttgattttttttttttttttatattttatatttaaattgttttaaattttgtggattttatttttaaaatatgtatatttaggtcgggcgcggtggtttacgtttgtaattttagtattttgggaggttgaggcgggtggattatgaggttaggagatcgagattattttggttaataaggtgaaatttcgtttttattaaaaatataaaaaattagtcgggcgcggtggcgggcgtttgtggttttagttattcgggaggttgaggtaggagaatggcgtgaattcgggaagcggagtttgtagtgagtcgagattgcgttattgtagttcgtagtttagtttgggcgatagagcgagattttattttaaaaaaaaaaaaaaaaatatgtatatttagaatttgagtattttttatttttttttatttttattgttaatattttagtttaagtttatgttattttttgtattttttaatttgtttttttgttgttgtttttgttttttttgtttatatttttatatagtagttaaagtgagttagttgaaatataagttaggttattttatttttttgtttaaaagtttttaatcgtttttttatttatttagagtaaagttaatttttttatagggtttgtaaggttttgtataaggttttttttttttaattttttttttttttttttttttttttttggtgagacgtagttttgttttgtggtttaggttggagtgtagtggtgtaatttcggtttattgtaattttcgttttttcggtttaagcgatttttttgttttagttttttgagtagttgggattataggtgcgtgttattacgtcgggttatttttttgtatttttagtagagatagggttttatcgtgttagttaggatggtttcgattttttaatttatttgtttcggttttttaaagtgttgggattataggtatgagttattgttttttagttaaggtttttttttttttaattttatttttgattattttttattatttagttttattagttttttgttgtttttgaaataggtatatttatattttagagttttgttttttttattgtttgaattgtttttttttttagttgttttcgtggttttgttttttattttaaaaggtatttaattaaggttttttttggttattttattttaaaattggaagtttttttttatgttttttatttttattggtttttttttttattattttttattatttaattaatatatatttaatttatattttttatttattgattgttaattttataaagttaaggatttttgttttttttatttatttgtttttggatttgattatgttttagtgtgtggagtaggattttaatttagcgtgtattgttttatttaaaatatttttaggaggagggtattattatttttatttatagtgagatgtggagtttagagaagttgagttatttgtataagtttatatagttattaagtgtgttttagatgtgagttatttatatttaaatttatgttttttttattttgaggcgttatttgttttagtagggtttattttttgttatttaaaaaattaatgtgggtatggttgggaaataagtttttgtttcgattatattagaaattatagatttagatatttttttatgtttttgttgatatttagtgtagtatttagtaagtattgatgtatgttatttgtttatttatttattagtttatttatatagtatttattgaatatagtttttatatttcgtaatgttttaggttttgaatttatggttttgaataaaatagatagatattaagtaaatatgaaatataatattagatagcgataaggagtatgagatgatataaggtagggtgaggggagagagaagaatttgggggttattttagattgggaggttggtcgggtgcggtggtttatatttgtaattttagtattttgggtggtggaggtgggattatttgaggttaggagttcgagattagtttagttaatatggtgaaatcgtgtttttattaaaaatgtaaaaattagttaggtatagtggtatacgtttgtagttttagttattttagaggttgaggtaggagaattatttgaatttgggaggtggaggttgtattgagttgaaattaagttattgtattttagcgtgggtgatagagtaagattttgttttaggtcgggcgtggtggtttatatttgtaattttagtattttgggagattaaggtaggtggattatttgaggttaggagtttgagattagtttgattaatatggtgaaattttatttttattaaaaatataaaaattagtcgggtatagtggtgtacgtttgtagttttagttattcgggagattgagataggagaatcgtttgaattcgggaggtagaggttgtagtgagttgagattgtgttattgtattttaatttgggtgatagagtgagattttgttttaaaaaaaaaaaaaaaaaaaaaaaaaaaaaaaaaaaaaaaaaaaaagattgagaggttaataagagatggtaattgtagttttaaaaataagtattaaattaaattgtttattattatatttttattatttttaattaggaatattgtgatagtattttatttggtatttttgtttttaatttgtttttaattgttggtttaggttattttcgatgtggtgattagtgagagatgattggggtatggtgagtttgatttggaatatattttaaaattagagtgggtatagtttgattgaataaggggtatataggttgggtttttaggaagtggattttgagatttaattcggagttgggatggttttttagagttatttttaattggggtaagggagttgggtttttgttttttatattaattagttatggaaggtgggttgtttttagaaagagtgtgattttggggaagtaattatttttagtttataaagagggttgagaggtgagggttgtttttgagtagaagatttgggtaatattgttaattaattaagtttaacggatatttataaaatattttgttaaataatagtaggatatattattttttttaagtgtatatggaacgttttttaggataggttatatgttaggttataaaatacgttttaataattttaaaaggattgaaataatataaagatgttttttgattataatagaattaaattagaaattaataataataggaaatttgagaaaattataagtgtgtgaaaattaaatagtatgtttttaaataattaatgggtggaagaagaaattataaggaaaattagaaaatattttaagttgaatgaaaattgaaatagaatatattagaattaatttttgatatgtagttaaagttatgtttagaggggatttatagtttgtaatttttatattattttatattatatataaaaaattaatttaaaattgattatagatttaaatgtaagtgtaaaattataaaattattagaaaaaggtttaaaagtagatatttatgatgttgggttaggtaatgattttttatatatgatatttttttatatttatataagtaataaaatagtattttgtttttggagatagggttttggtatgttatttagtttggagtgttatggtgtaattatagtttattgtagttttaattttcgggtttaagtgatttttttgttttagttttttggatagttgggattataggtgtatataattacgtttggttaattgttaaattttttttttttttttttggtgtggagatagggttttattatattgtttatgttttagataaaatattgataattggattttattaaaattgaaaatttttgtattttaaaaggtattattaagaaagtgaaggttgggtgtggtggtttatatttgtaattttagtattttgagaggtcgaggtaggtggattatttggggttaagagtttgagattagtttggttaatatggtgaaattttgtttttaaaaaatgtaaaaattagttaggtatggtggtgtatgtatgtagttttagttatttgggaggttgaggtaggataattttttaaatttgggagttggaagttgtggtgagtcgaaattatgttattgtattttcgtttgggtgatagagtaagattttgttttaaaaaaaaaaaaaaaaaaaaaaaaaagaaagtggaaattgtttttattaaggaaaaaaataaatataaaaataatagtaattataagaaagtgaaaagataaataaaagtaatagaatgagattaagtatttgtaaattatttattagataagggatttgtatttagaatataaaaagaatttttataatttaataataataataaaaaatgggtaagagatttgaatagatattttattaaagaagatatataaatggttattaaatatatgaaaatatattgtttggggtttatttagttttttgtattaattagttaatattttttgttaaatttgggagttttttaggtattgtttttttgagtatatttttttgttttatttttttttttttttttttaaatgttgatgatagaacgttagttagtttttttgttatagttttataaatgaatttttgtttattttttttagtttattttttttcgttgtttagattgagtaattttttttttatttttaagttcgttgaattttttttttgttttttttaatttgttgttaagttaatttattgagtttttaatttttatgattatatttttaagttttaaaatttttatttgattttttttttttttttttttttttttggagatggagtttcgttgtttttgtttaagttgaagtgtaatggtacgattttggtttattgtaatttttgttttttaggtttaagtgatttttttgttttagttttttaagtagttggaattttaggtatttgttattatgtttggttaattttttgtatttttagtagagacggggttttattatgttggttaggatggttttgattttttgattttatgattcgtttattttcgttttttaaagtgttgggattataggtgtgagttattttatttagtttgatttttttttatattttttatttttttgttaaaatttttggtttttatttgttttaagagagtttgtaattgtttgttaaatgttgtttttttttttttttttttttttttgagataaggttttgttttgttgtttaggttgaagtgtaattatggtttattgtagttttgattttttaggtttaagtgatttttttattttagtttttaagtagttggtattataagtatatattattatgtttggttaattaaaaatatttttttttttaaggggttgggattataagtatatattattatttttgggtaattattattattattattattattattattattttgttgttgttttttgtagagatagtatttttttatgttgttggttatgaatttttgggtttaagtgatttttttattaggtatgagttattgtatttggttgtaaagttttttttttttttgagatagagttttattcggttgtttaggttggagtgtagtagtgtaattttggtttattgtaatttttattttttaggtttaagtgatttttttgttttagttttttgaatagttgggattataggtatttgttattatgtttggttaatttttgtatttttagtagagatggggttttgttatgttggttaggttggttttgaatttttgattttaagtgatttgtttatttcggttttttagaatgttgggattatagatgtgagttaatgtgtttggtttgtgaaattttttttttttttgagatggagtgttgttttgttatttaagttggagtgtaatggtatgattttagtttattgtaatttttgtttttgggtttaggtgatttttttgttttagtatttttagtagttgggattataggtatgtattattatgtttagttaatatttgtatgtttagtggagacggggtttcgttatgttggttaggttggtttcgaatttttgattttgagtgatttattcgttttggttttttaaagtgttgggattataggagtgagttaatgtgtttggtttgtaaagtatttttaatatttgttttaaaatatttgtttgttttaaatatgtattaggtgattttaatatttaagttaatttgggtgttgatgtttattaattgtttttttttatttaagattttttcgatttttggtatgataagtgattttcgtttgtattttgtatattttggattgtatgttatgagattttggattttatttaagtttgttttagtgattattttttgatatcgtattagttgagtaaagagggtgttgttttattgttgttaggttgggggagaggtttaggttttttatttggtttttgtgaatatttgagggagtcgtgttttttgttattgttaggtgtggatgggggtttaggttttttattaggtttttgttgatatattttggttgagagagtaagaagtattttatttttgttttttacggggtttttagtgatattggttgtgatggagggggattttatattattaggcggggttgagagttttagttttttatttgttggggagaggtgttttagttgggtgggagttgatggttaaattttttatttattttttattggtagatatgggggtgagagtgttttttttttttttttttttttttgtttgaaatagagtagttattgtttaaaagttttgtttttttaggatgtttttttgttggttttttggttagagatttttcgggattttttttatttttttgttggagttttttggttgttggtttttttagtatttagttttgtatatatgaggtaaaagttaaatttagggaatttattattatattgttttttcgggttttgagatttttagttagtttgttttttttgtattttttaggatttttttatgtttgttttatatatattatttaggattgtagttgtatttagtaggaggaattagaagagtatttacgttattttgttttggagtttgaaggtagttggttaagtttttaaaatatttaatatagattttttatgtgatttagtaattgggtttttaggtatttatttaagaaaaatgaaagtaggttaggtgtggtggtttacgtttgtaattttaggaatttgggaggtcgaggtgggcggattattcgaggttaggagtttgagattagtttgattaatatggagaaattttatttttattaaaaatataaaaattagttgggtatggtggtgtatgtttgtaattttagttatttgggaggttgaggtaggagaattatttgaatttaggaggcggaggttgcggtgagttgagattgcgttgttgtattttagtatgggtaataagagtaaaattttgttttaaaaaaaaaaaaaaagaaagaaaaatgaaagcgtattgtttatataaatatttgtataagaatttatagtagtgttatttataataggtatgaagtaaaaataattaaatatttattgattagtgaattggtgaataaaatatggtgtgtttttttgggaggttgaggtaggtgtattatttgaggttaggagtttgagattaggttggttaatatggtgaaatttcgtttttattaaaaatataaaaaatttagttgggtatggtggtgtatttttgtaattttagttatttgggaggttgaggtagaagaattgtttgaatttgggaggtagaggttgtagtgagttgagattatattattgtattttagtttgggtgatagaataagattttattttaaaaaaaaaaaaaaaaaaaggtgtgtttatataatggaatattatttagtaataaaaatgaatgaaatatggatatatgttgtaaaatgaatgaattttaaaaatattatgttaagtgaaagaagttagatttaaaaggttgtaggaatttatttatacgaaatgtttaaaataggtaaatttatagagatagaaagattagtgattgtttagggtttaggtttggaatgggggttaagtgtaaaggaatatgaaatttttttttggtgtgatggaaatgttttaaaattagattgtggtgatagttttataattttataaatatattaaaattattgaattgtatatttaaaatggatgatttttttttttttgagatggagtttcgatttgttgtttaggttatagtgtagtggtgttattttggtttattgtaatttttattttttaggtttaagtaatttttttgttttagtttttcgagtagttgagattatagggggttattattatatttggttaatttttgtatttttagtagagacggggttttatcgtgttggttaggttggtttcgaatttttgattttaagtgatttatttatttcggttttttaaagtgttgggattatagttgtgagttattgcgttcgattaaagtgggtgaattttatggtatgtaaattatgttttaataaatttgtgagaggagaggaggtagagatattttgtgttgtagaattttttaaggaattttgttgttaagagttgtagagaaagtatgtttagcgagatagtatatgaggttatgagaaattttaaaaaatttattattttagaaaatttatatatataaatagagataatgaaaaagaatttttatatattcgtgatttagatgtaataattattaatttaggattattgatgtttgtaattttagtattttgggaggttgaggtaggtggattatttgaggttaggagtttaagattagtttggttaacgtggtgaaatttcgtttttaataaaaaatataaaaattagtcggatatggtggtgtatgtttgtaattttagttattagggtggttgaggtaggagaattatttgaatttaaaaggcggaggttgtagtgagttaaaatggtatttcggtttgggtaatagagcgagatattgtttaaagaaaaaaaaaatttaggattattttggttttatttttatttttaatttttatattagattattttagaataaattttagatatgatatgatatgatatgatatgatatgatatgatattgtattatttttattataaatattttagtattttaaaagataagaatttttaaataatataattattttgttagtattatttttgaaaagtttatataattttttaatattattaaatatgtaatgtttagtttttttaaattttttattaaatatatatatagtttgaattaatattaaaataatattcgtgtattgtatttagttgatatgtgttttaagttttttttttttttttttgaagtggaatttatattttagaatagttttagatttatagagaaattgagaggatagtatagagtatttttatgtgttttttttggatttagtgttttttattaataatattttacgtgagtgtgggtatatgtgttataattaatgaattaatattgataaattggtcgggtatggtggtttacgtttgtaattttagtatttcgggaggttgaggtgggcggattatttgaggttaggagtttgagattagtttggttaatatggtgaaattttgtttttattaaaaatataaaaattagttaggcgtggtggagtatatttgtaattttagttatttgggaggttgaggtaggagaattatttgaattttggaagtggaggttgtagtaagttgagattatgttattgtattttagtttgggtaatagagtaagattttgttttaaaaaaaaaaaaagataaattattattaacgtttatattttatttatttagattgttttagtttttatttggtgtttttttgtttgttttaggattttatattttttttttttttttttttgagacgaaattttgtttttgttgtttaggttggattgtaatggtgtgattttggtttattgtaattttcgttttttagttttatgtaatttttttgttttagtttttcgagtatttgggattataggtgtttattattatgttcggttaatttttttgtattttgagtagagacggggtttttttatttggataggttggtttcgaatttttggttttaagtgatttgttcgtttcggttttttaaagtgttggattgtaagcgtgagttattacgtttggttttttaggttattatattttatgtatttgttatgtttttttgggtttttttggttgtgatagttttgttagtgttttttgtttttggtgattttgatagttttgaggtgtattagttaggtgttatgtaggttgttttttttttggaatttgtttggtgatttttttatggttagatttggagtttaagtttttttaaatttttttttatttttttgatatttatttgttgaagaaatggtttgttttttatagaattttttatattttgaattttgttaattgaattattgtattatttattatatttttttgttttttttattttttttttaaattggtagttagatttaaagattttatatgatttatgatttattttttggtaaggttacgttataggtggtattgtgttgtgtttttattaggaggtatagaattttagttggtagttatgatgagtattgttagatttattatttttttagggattataaaatgtagatattttaagtttattattttgtttaaattgattttatttatatagattatgttttatttattattttgatatgatttatttaggaaaggtagattgatgttatttttttttttttatttagtagtttttagaataatgagtttgttttttagtatttgttaaaggtaattaatgattttttatttagtattattatgagttagttgatttgaatgtgttttaattcgttgttattattatttttattgaggttttatttatgttatatttgggtagtgcgagttttaagttgataaaatattaatatttttgatgttttttttgttttttggtgataagatgtttaggtttattttgtatataagttgttatatgtttttttttagaggaaatggtattaggagattttagtttgggtgttgaggaaggtttgtatttatttattttttattttttaagataggaggaataatatatttgtttgttgatgggagtgagttattgtagagggaaaggcggtgtgtaggagatggggtattgttggaggaatggttttgagtaggtgagaggtagtggggtttagtgtttaagtggaggagttggttgttagttgaaagtgaggaagatgagttgagtatattggtttatgttagtaattttaatattttgggaggttgaggagggtggattatttgagttaggagtttgagattagtttgggtaatatggtgaaatttcgtttttattaaaaatataaaattagtcgggtgtggtggtgtatgtttgtaattttagttaattgggaggtcgaagtaggagaattatttgaatttaggaggtagaggttgcggtgagtcgagattgcgttattgtattttagtttgggttatatagtgagattttgttttaaaaaaaaaaaaaaaaaaaaaaaagaaagtgaggaggatggaggttgtgtaatgaaatataagaaagtgtgaaatagttgttttgaaattttgtgagtgagtggttaggaaaatgtcgtatattttttttttttttttttattttaattttattataggttatttgttgggtgtttttaatggttaatttgaagtttgtaaatgtttgatgagtatggttgagtatttttatttaattattttagttgtttggatgtaggtatggagtcggtgggaagttggaggtagttagagttaggtttttgataggtaggtatgatggagggaatgagggaaataggagttgagatgtaagatagtttttataataatgttttatgaaatttaagcgggataaggttgggagggtataggattttataatgttagggttaaaggggttggaggtttggagaagtgaaaatattgtttgatttttggaggtggatattagagggagtgatttgtaaggataggaagggggatatttaaaattgagattatggagaggttttaggtataggtataggtaatgataaggtttagatatgattgtggagtgagtggttgtggtagggggaggataagattattggaggtgagaaggttaaaaggttaaggtgagaggttagggtgttgggtggagtgttttggttgatagagaagttataaagaatggtagtaggagtgggatgaagagaaagatagtgatttagggattgaaaattttagtgaattgtgaagagtgaggagtgattggaaggttgttaaatgttggtaataggagtagttgaaggtgacgttggaggttatatgtattgtaaagtagttaaggttttgtattatttttgattattagagaaaagtttatgtatttatttatttatttaagtagtaagttaattaagtttgattatttattttgtgtttagtaaaattttttttgtttttatagaatgtatatgtatttattataaaattgtttttataaagttaggatatttttaggatatttttagttaattagatattttcgttaatttttttagttaattgatagtttttttggttgtttgtttagtagtgaattttaatgaataaaatatttgggattaaaattttttttttttttttattttttgagatagggttttgttgtgttgtttaggttggagtgtagtggtgcgattttggtttattgtaatttttgttttttaggtttaagcgatttttttgttttagttttttaagtagttgggattataggtgtatattattatatttgattaatttttgtatttttagtagagatggggttttgttatgttggttaggttagttttgaatttttgattttaagtgatttgttcgttttggttttttaaagtgttgggattataggtatgagttattgtgtttagttatattaaaatttttgtgtaataaattcgtagatatggaaattttttattttttataaaaaaattttattttgtgtagatattaggtgattttattataagagttaaaatgaaagtgttgttagcgtggtgagagaggtggtgatgttagattatttgtggaagtgaaaggattttggagttgaaaggaatttttaggatggttttgtttttggtttttaaattttttttttattatgttaaatgtagaggaattttgtttattaaatttatatttagaattttaaaatagagaagagatataggattagcgttttggttgagtttttttttttttgagattttatttttatttagagtgattttttaaggttgttatgggatgtaggatgttggggaatatagtttggaattgtttatttggttttatttttttttttattgaggtttagaggggagacgcgatttgtttaaggtgatataggtttgggatttatgtttagtgttttgtttgttggttaggagtggttgaggaaagtagagtaggggtgaggtgggaggaaagggtagggtcgtattgttttggttttggagttttcgttgatagttttgggttttttttatttgtttttttaattttggggataaaagatttttttttttttttttttttttttttttttttttttttttttttttttttttttttttttttttttttttttttttttttattttttttttttttttttttttttttttttttttttttttttttttttttttttttttttttttttttttttttttttttttttttttttttttttttttttttttttttttttttttttttttttcgtaataaaggtatgataagaaattttttggtgggtagagtagaagagtatataatagtgaaaaaaatatttagtttaggagtttgatatagtgtgatgttggttagattagttaatttttttgagttttatttagtttttttatttgtaaagaggttggggttggcgtgggtgagtgggtgggtgttggatgaagagggaaggagatggataggaggtatttggcggatttggttagtgttagttgtcgttttaggagattttgggttggggcggtattattggttattttttttttggggaggttgataattaattttggaaatagtttttaaaatttttattggatatatataattatggattgataattttttattttaaatttagaaattataggtaaaagttaaagatattataaatgagttttttatttttatttttttatgataaggaaattagttgtgtgttggggtttagtatggggaaagaatttattaaaatatatttaaaaaggtaaatttaaaaatttataattataagagtgaatgataagatgattgttaataaaattaaataagtaaaataattgtttgttttttagaaaatgtatttaagttttagggatttaaaatgtttatgaatttgtggatgtttgtgtgtgtgtgtgtgcgtgtatatttttttttcgttgttgtttttttgtttttttcgttaaattatatggagttttggttaaggatagaggattgttagatgtgtttttaggggaatcgttgttttttttatattagggggaagtttttaggtagttgaaagcgggggtttaggtgggtatgggggggtgggagggttgaggtttaggatgggagggtgggtgagagttagtaagggtgggtggggtattgggggtgggtagtgggtatttggttaggggtttaggatttgttttagggttgttgtttaggggggtggaggaaggggtagtgaaggggttagagtatttaagatgcgtagtgtaggtaggggataggttgcggtgtgtgaagagggtagtttgaggtggtgagatttgttgattatttagttgggttgttttggtttatttataattggttttttttgtgtgtttggtaaatattaaaggaggtaaattttttaattttggtttgtgttgatggtgaggcgggagaaggtttttttgggttttaggtttttaatttggtatagttatgggttaagggttgtttgttttttatttgttttttttacggggtttttgagtttagttttgtttcgggtattaggagagtttgtttggaaggttttttggtttttaatgttttgttttttaaggtttttagtttaggtgggagagatatatagaataaatagtatcgtgggggtggtgggaggtggtgtgaatatgttttttgtaagttttgggaagaagttgtggttatataatggaatgtttttagttttgatttttttttggaatttagatttttttgtttttttcgttaaattatacggagtatttggtaaggatagaggattgtcggatgtgtttttagtggaattattgttttttttatattttttatattagttattttttttattttttattaggatgttaattgaaatatgttttagtttaaattttttattttttgtttttgtagttatttttttttttttcgtaattttggtatagcgtattgtttaggttggattacgttgtgaatgtgttttttaaaatttatgtgttggaaatttaatttttatgtaattgttggaaggtggggttttttgggagggttttttggtagagtcggtacgaatggattaatgttattataaaaggatttgatggaaagagtttattttttttgtttttttattttttgttacgtgaggatatagtgttttttttttttagaggatgaagtaatagatgttatattggaagtagagaatagtttttattaggtagtagtgttttgattttaggttttttggtttttagaattgtgagaaaagatattttttttttttttttttttttttttttttaagatagagttttattttgttgtttaggttggagtgtagtggtatgattttggtttattgtaattttcgtttttcgggtttaagcgattttcggttaatttttgtatttttagtagggacggggttttattatgttggttaggttggttttaaatttttgattttaagtgattcgttcgttttagttttttaaagtgttaggattataggtatgagttatcgcgttcgtttcgttttgttattttttaatttcgtatgtttggattgttatagtttgaggtttttagtgtttggtttttttcgtttttttttacggttttaagattgttttttgtatttttcgtatttttttttcggtgtttttttgttgggaattgttttttttgtttgttacgtggtggttataagggggtagtagaggttgaggaaaatttggtgagattaggttgggggttttttttcgggtttacgagttattttttttcgtttacggagtattttttgttcgggcgttttttaggtcgttgttgttttttggttttgtttttttttttgagattcgttgttttagagaagatttttggagtagagatttggagtaaggatttttaaatttttttgattatatattttatttagtaatatattttgaatatgtagttaataaatatgtgtaaatataatgtaggttgaaagaataaacgtaaattatattaaaagggtataagattgaagattttataatagttttaatatgttttttgtttttttttttgtttttttagatttttggaggatttttagggttggtgtttttaatttggtggttttttgtttagagtttaattgagttttgatgtagatttggtttttgttagggtttggttatacgatttgtgattttgggtaggtttttttagattatcgaggttttgttttttagttgtaaagtgaggatagtaaggattattttatggtattaagttaaaatatttacggaaataaatatgtaatgtttagagtaagatgttatttagtgaatagtgggtttgagtatttggtggtggttattagagagtagaggcgttggttttagggtttagtttatagttttgtttgtggagaggagatttagtgataagagagaaaaaagtgttcgatattttggggattgagaatttgttttttagggttggatagggtagggttttttttgtttttagtattttaggttttttttttttgattttattagggacggaggttaaggttggagatttttaggtttttttatttaatttggtttttagattttttttattaggatttgtgtgttttagttttaattatggatgggtttgatttatacgggattgagagggttagtaaattcgtttttattattgattgggttatttatttgggtagtatatatgttgttttcggtaattgtttttttttttgatatttatgattttatatataaattgttggaagttatgtcgtaatatagtttttttggtaagagtatatatggttaaggatattgtgattgaatttgaagagtaaataatatagttgtgtattgagttatataatgattagggttttttttattttggggatagagtgagaatttttttatttataaggtggttttgttttgattggtgaaaatagagaattattttattgttgtataaaagtttaggtcgggtacggtggtttatgtttgtaattttagtattttgggaggttaaggtaggtagattatttgaggtcgggagttttagattagtttggttaatatagtaaaattttatttttattaaaaatataaaaattagttgggtgtgatggtgggtgtttgtaattttagttatttgggaggttgaggtaggagaatcgtttgaatttaggaggtagaggttgtagtgagttgagattgtgttattgaattttggtttgagtgatagggtaagattttgttttaaaaaaaaaaaaaagtttaaatatgtgtaatatgaaaattgtgtagttaaaggtgtgattggtgtttaatattattttattgtatttttgttttaaatttattttatttttgttttgttttgtggttttggagttggattttataaatattttttttttgttattgggtataacgttagattttgatagtaaattgtattggaaggaatattgtaagatatagtagagaaaatagttttattttagttttggtatttttttttgagatggagttttattttgttatttaggttggagtgtagtggcgtgatttcggtttattgaaatttttgttttttaggtttaaacgatttttttattttagttttttgagtagttgggattataggtgtatattattatatttggttaattttgtatttttagtagagatagggttttattatgttggttaggttggtttcgaatttttgattttaggtgatttgtttgttttggttttttaaagtgttaggattataggtaggagttatcgcgtttggtttgttaggtttttttaatatgttttattattatgaaatttatattgggggggagatttagataggggttaatgggggtaagtttgagttttgttaggttgatatttgggtattgagtagagtgattagtgtttgtgttttgatatgtgtgtataatttttgttggaatgggaaatgttaatttagtttttttatataatttgttgggttgttttttgtaaaattggggttttttgtttgtggttttatgaaaagaaaaggaatgttttttttttgtaacgtggtttggtttttatagttacggtgtagtaagtagggttattaaaagttattttgtttttttggaagtagttgagaaagggaagttataaatttgataagttggtaaaaagttaattttttattagttagtttttggtttttttttttttgtgtaaatgagttgagtgaataataaaagttattgtttgttttttttgtaaagttttgattaatagggaagaagatttgtgtgattagttttaggttgtagtgaattttgtgtatttttgttattttgaattataaatatttgtattgtttggtttttttttagaaattattttttttgttatttttttttgtttttgtttttttgtgtcgttttgttatggagaaggatattataggatagaatataggtttaggatttttgtaagtttgttgtttaagttagttttgtagattggtcggttataaattttgttgtaggtttttggaataaaaattggatgagatttttttggttttgttttatgtggttgagagtttgattttgtaattatgtaggggtatttttttttttgatttttgttatttggaggatggaaatttttgggtttaagttaggtggttggtttgagaggattgggagtttgagatatattagtatatttttcgttttgaatgtgtcgagtttttaggtgagttttgttttaaaacgttttatttttgttggttggatttattaggataaaaaaatagttttatttttataggatttttgttgtattttgttattttaaatttatttttaagagggaatatttggggatgttttttttaggaatattttttgttgtttatatggtaaaaatttggaaaattattatttgtaatttaaaaaaggtgtttgagtttttattggaattaagtatattattgaaagaaaaaggattttagagattttttatttaaaataattgaaggaaggttaaatagtagtgtcgtgggtagttttaaaaatttttttgagtagttaaaattattcgtaagtttgaaaatgattgttttagattttttttgggaagagtattggtaattattttatgttgtagtatagtagttaaatttttgtttttttattatggtggtttgggattattttttagtttagggaatgcgttttttttggttttgtatttgtgggattttttgttatttattgatggatagtttttgattttttgttttgaattttttttgttttgagatatttttggggtgattttagattttgtaaaaaattgtttggtatttttttggagatattttgtgtatttgtggttaagttataattttagttaaggtttattggttttaggtgggaggttatttttggtagagagtttaaaagttagaaatattagttgtttgttttagttaaaaattggtaataagagatttgaaagaattttttttaagagttttatagttaaaagttaatttaattaaaattgatttagaatatatgtgtatagatattgttttaaagtttttgttttttttttgtaaaaatattttaagtaattgaattttgtttgtttaaattttaattttggtatgtaaaagttaggaaagaaatatatttttagagatggttattgacgttgtttatagtgaatagttattattatagggtggtattgttttttttttgtatatttagataagaaaagtatgttttcgggtatttagaaggtatggaatgagggttaagatttttatggagtattaagtgattatagaataggttgattgttatagggttgtttattagttttaggggaatgtttttgtagtgaagtgtatcgtaaaagtattgtattgttttgttttgcggtgttttttttttttgaggatttaggatttagtgtaaaagttggatttttaattttggagatttattttgttttttagttgtgtttgtttattaggttatagaaattgtatgtttttttggttttgttttttaaagggttttattttaaagttagtaatttaattaagaaattaatatttttaaaaaaattttagtgggtaagtgtgtttgtttttttaattattttttttttttttttttttttgagatagggttttgttttgttatttaggttggaatgtagtggtgagaatatagtttattgtagttttgattttttgggtttaagtgatttttttagtttagtttttttagtagttgagattattacgtttagttaatttttgtatgtttttgtagagatggggttttgttatgttgtttaggttggttttgagtttttgggtttaagtaatttttttgttttgatttttttaagtgttgggattataggtatgagttattatatatagttttttggttattttaattgaatttttatttatattatttttttttggtttaaataaaatatgaattttttattttattttatttaagaattgtgtttttagaaatgtagatttggagtggtatagttgataattatttagggtagggaataggtaattaagagaaggtttaaaatgaggaagagaaattttaaaaattggtatatgaagaattttataaatttataaaatttgtttttgtgtgtttgtatgtttgtgtgtttatatatattatgtgtttgtgatatttttattattaaaatatatgaaaaagttgtaattaatggtttttagaaaaataagtatttaaatattttattagagaaatatatatatgtatatatatatatatatatatgtatatatatatatatatatatatgtgtatatatatatatatatatatatattttaatatagagtttcgttttgttgttaagttggagtgtaatggcgtaatttcggtttattgtaatttttatttttcgggtttaaataatttttttgttttagttttttgagtagttgagattataggtatacgttattatgtttagttaatttttgtatttttagtagggttagggttttattttgttggttaggatggttttgattttttgatttcgtgatttgtttatttcggttttttaaagtgttgggattataggtgtaagttattgtgttaggtcgagaaatagaaattttaaggttttttagtttatgtgattttagtgatttttggtaaataaagatggttttaaagattattaataaaattaaataatatttttaaaatgtatgtatttggtttaaattagttaaaggttttgtaaggttatattaaggatgtagttatattattgggtttaagttatagggtgaaagatatggtttaggtagagagtgagagtgaaaagaggttagaattttggggatattattatttaaggaagaggagttttttagggataatgaggattattatatgggaggtaggatgttttaaggtatagaatagtttgaattataaaaggttttttatttttaggaaaagggaagagtagtgtagttaatatttagatttattttgtattgtatttaatggaaaataaaggggaaaaaaatgtattttgttagttttatattatttgtgttgtggttagaaagattaaaatgataagtttttttaagaagtggggggatagttttaattttggtaggttataagatatgtagtgttttttagaattaggggaagaattaaggttaattagtattaagaaaaataagtattttgtttattgggtttagtatttgagtcgttttgatgttttagttggaatagaaattaaattgaaaagtgtaatcgatggcgaggaagtaaagagtatggatatgatttttttgaaaagtttggttataaagaaaaggtgtaggtcgggtgtggtggtttacgtttgtaattttagtattttgggaggttgaggtgggtggattaacgagggtaggagttttagattagtttgattaatatggtgaattttcgtttttattaaaaatataaaaaattagttgggtatggtggtacgtgtttataattttagttatttagtaggttgaggtaggagaattgtttgattttgagaggcggaggttgcggtgagtttagatcgtattattgtattttagtttgggtgatagagtaagattttgtttttaaaaaaaaaaaaaaaaaaaaaaaaaggtgagaataataggatattttgaaagtttttttttttttttttgaagattggagagttttgattgtatttatatgtgtttgaggggtaaggtatgggtatgggaaataggaaagaggttgaagatgaagtatggatttttgggagataggagatgatggaatttagagtaggatatttaaaggatgattcgtaaatgggtggtattggtattatttggaagtttgttagtaatataaaattgttagattttattatagatatagtgaattagaatttgtgggtgtagggttttagtaattattaggtgatttggatatatgtttaagtttgaaaattatttggttagagtataggtgaagggaaaaattttgtatggaagtaggaatgttatttttattgagatatgagagaaggatgtgaggatagatttttggggtaattaatagagttgtgagtaatttaattttttttgtgtgtgtgtgtgtgtgagaaatatttaaaataataatgtttttttaagaggtgggggggatggttttaattgcggtaggttataagatacgtagtgttttttagaattagggaaagaattaaggttaatagtattaagaaaaataagaattttgtttattgggtttagtatttgagttataatataaaattgttagattttattttagatatagtgaattagtatttgtgagagtggggttttaggaatgtattaggtgattttgatgtatgtttaagtttgagaattatttggttagagtataggtgaagggagaaaatttgtatggaaaatttgtatggaagtaggaatgttatttttattgagatatgagataagaatgtaaggtatgattttttgttgagaatgaggattaggaagtggtttaagaatatgtttgaaggtttgtaaaagttgttttggttaatagaaggatatgtttaagtgagtatgttggaggtttagaggaatatggagttgaagaattgggagtttaatatgtagattttttaattttttgataattgagagggtagagttaatttgatttagtaaggggatgtttgaattgtgggtgtaattgaattgattgattatggtttaggttagaaagttttaggtaatgtagtcggtaagggaaggaagttgattgattggaaataaaagggggaagtgtttgaaggtattagtgaggttaaagaagaaaggtagtgggaattttagagtattagagttgtaaagatattgggttttggttagagagtgagatgttgatgtgtaaggttttagaagggattttttagttttattaaaatgtaaagaaagtatttagtaataaaggtagagtttaaaataaggaagaatttggaagaatagagataatttagaagagattttaaaatataattataattaatgagaaataaaagtaggtattatatttatgaaagaataagatatttaaataagggaaggattaataagtaaatagtttttgaaaatttaaaatatgagagtttagaataagtatttaataaaggtttgggaaggtaaaggagaagaaatattttagtaagtataataaaaatataaaaatataggtaataggaaaagtaaagatgtgaaaatagaggattgagtttatattagttattttattaaatttttttattatttatagtaatttgtttttagattaatttgtttttagattttatggtgtaattatgttttttgtaaatgttgatagttttatgtttttttttttaattttttggttttttttttttattttattatgttggtaatgattaaaatataatgttgaataaaagtgatgatagtagtttttttgtttttataattttaatgagaatgtattttaattttttttttttggaagatgtgttttagaataaaaaaaaatagatattttttattaggttaaagaagtttttttttatttttggtttgtttatttatttatattatttatttatttgagatggagttttgtttttgttgtttaggttggagtgtaatggtatgatttcggtttattgtaacgtttgtttgttgggtttaagagatttttttgttttagttttttaagtagttgggattacgggtaggtattattatatttagttaattttgtatttttagtagagatgggggttttattatgttggttaggttgattttgaatttttgattttcggtgattagtttattttagttttttaaagtgttgggattgtaggtgtgagttattgtatttggttttatttttggtttattaattgtttttttttttaagttagggatgagtaaattattatttaatgggttaaatttagtttgtaatttgttttttttttgtatagtttatgagttaagaatgatttttatattttatgtaaaatgttatataatattttgtgatatgtgaaaattatatgaaatttaaatttaagtttttataagtaaagttttattggaatatagttatgttttttatttatttatgtattgtttatgattgtttttgtgttataaaggtagaggtgagtagttgtgatggagtttatagggatttataaagttaaagtaaatatttggttttttatagaaaaagtttattgatttttgttttaagttaaaaatggtattgggggaaagttaggtttatggatgtgtagattaagaataagggaaagattttagttttaatttttttttatatagatttttaataggtttattttttttaggtttatttttttattttagatttttttagtttttagttttttatttttagagatttagggttttgtttaaatagtggttttttttttgtgtagtatttttttggatgtataataggttttatttttattagtttcgttttttattagttttttagaaaagtattatagtttgttgttgttttttgttttttttgtttgtttgattatttatttttagagttattttagtagtgtttggggagggagttatattttttattttttaggtattattatttttttttttttatcgcgaaatagtatagtgaaagggaggagatggagtgaagagatcgagggtagggagagggaggggggtgtgacggggtggggaagtgaggaggaagagggggaagagttattggggaggaggaagatgggggaggaagaggatgatggggtggggtggtttagggagtgaataggtcgggttgggtgagatgaggttgggtgtatgtgtttgaggagttcgggagtgcggaggggtagaaaggtagatagtgcgtgcgggaagaggggatgggggtggggaggcgagggcggttagtgggttgagaggagtggggagaagatttagggcgagagaggtgttatcgtgttggggaaggcgggattaggagaggtaaaagaatggggagagaaatgggagggagagaaggaagttgagggagatttgaggagagaaggcgtttgagggggaattaggaggggagaaggtttgtgagggggaaatgtgagaggagaaggggcgcgagggggaatcgcgaggggagaaggggcgcgagggggaatagcgaggggagaaggggtttcgttttttggtcgcgtcgttttaggtgtcgtcgtttggcggttacgaggaggtcgttttttgtttgtcggtttggcggttttatttaatatcgtaagattttaaaagggaaatttttttagggttgagttatagggaagaaagcgatttttttcgttttttttaaagcggtaggtttttttttttcgtttgttttttaaataacgtggtatttcgtagtttggttgaaatttgaattaaatgtaatgtttttttgatttttatttttttttagaataatagttgtgatatgatttgttttggggttttttttgcgtttcgttttgggttagagtatgtaaagttcgtgggtttttgtgtgtgtttgagtagttgttttgttaagattttatatagttgtgtgtgtgtcggatttaaggttttggtggtatgggtttatgagggaattttttgatttattagtcgtaaagatttatgggagaagtatggttttttgaggtcgtattattatttatttttttttttggttgggagtgggggtttttttggttttgtgtcgtttttaggggggttgtcgttttatttagtttttttttgttttttgtgggtcgagttgtttttttgatgagttttaatgtaagtatttggatattttagttgaagatgttgtatttatttgttttttttgtttttttttgtgagtgttgtggattatagttgtttttaattagttattttggtttggtaatttatagtagtaaatgttaatattggatagtgtgattttttttattttattattttttttaaatattgttttagtaatttttgtttttttgattttatatatagattttaggattagtttgtttatatttataaaaggaagtttttgataggaaatgtgttaaatttatagatcgatttgaagagaattgatatttttgttgttttttagttaaatgatattgtatgttttttcgtttgtttagatttatttttatttttttattagtattttgtagtttttagtttgttgattttgtatatattttgttagatttatatttaaatatttaattttttttggagtggttgtaaatagtattgtgttttagttttggttttttattttttattgttagtatagaggaatataattgattattattttgtaatattgttaaaaatgtgtttgaagttttttcggagtattatttttggatataagtttttgggttgataggttttattttttagtagttgaaaaatgttgtgttattttttttttgttttgggttttttggtgagaaatttattgtaattttaattgttgtttttttataaataatgtttttttttttagaatgtttttaagatttttttaagtttttagaaatttgattatgatgtatttgagtatagatttttttgagtttattatattagaagttgttttagttttttgaattatatatttatgttttttattaagtttgagaagtttttaattattattttgttaaaaagtttttttagattagtttgggtaatatgataaaatattgtttttataaaaaaaataaaaaaaattagttggttatggtggtatgtgttagtggttttagttattcgggaggttaaggtaggaggattatttaagtttgggagtttgaggttgtagtgagttgtgattatgttatcgtattttagtttgtgtaatagagtgagagtttgttttaatttttttttttttttagtattttatgtcgtttttttttgtaattttagttataggaatgttagagattttgttattgttttatagatatttgttgttttgttcgtttttttttttttttttttttttttttttattatattttaagttttgggttatatgtgtagaatgtatattttttttatataggtatatatgtgttttggtggtttgttgtatttattaatttgttatttatattaggtattttttttaatgttattttttttttaattttttattttttgataggtttcggtgtgtgatgtttttttttttgtgttcgtatgtttttattgtttaatttttatttataagtaagaatatgcggtgtttggttttttgattttgtgatagtttgttgaaaatgatggtttttagttttatttatgtttttgtaaaggatataaatttatttttttttatggttgtatagtattttatgatatatacgtgttatattttttaaatttagtttattattgatggatatttgggttggttttaagtttttgttattgtgaatagtgttataataaatatgtgtgtatgtgtttttattatagaatgatttataattatttgggtatatgtttagtattgggattgttgggttaaatggtatttttagttttagatttttgaggaatcgttatattgttttttatagtggttgaattaatttatatttttattaatagtgtaaaagtatttttatttttttataatttttttagtatttgttgttttttgattttttaatgatcgttattttaattggtgtgagatggaattttattgtggttttgatttgtatttttttggtgattagtgatgatgagtattttttttatatgtttgttggttgtataaatgtttttttttgagaagtgtttgtttatattttttgtttattttttgatgggtttttttttgtaaatttaagttttttgtagattttggatattagttttttgttatatggatagattgtaaaaatttttttttattttgtaggttgtttgtttattttgatgatatttttttttgttgtgtagaagttttttagtttaattagatttcgtttgttaattttggtttttgttgttattgtttttagtgttttggatatgaagtttttgtttatgtttttgttttgaatggtattgtttagatttttttttaggagttttatggttttaagttttatgttgaagtttttgatttattttgagttgatttttgtaaaaggtgtaaggaaggggtttagttttagttttttgtatatggttagttagtttttttaatattatttattaaattgggaattttttttttattgtttgtgtgtgttaggtttgttaaagattagatggttgtagttgtgtggtgttatttttgacgttttcgttttgttttattggtttatatatttgttttggtattagtattatgttgttttgggtattgtagttttgtagtatagtttgaaattaggtagtatgatatttttagttttgttttttttgtttaggattgttttggttacgtaggtttttttttggttttatatgaagtttaaagtagtttttttttaattttgtgaagaaagttagtggtagttttatgggaatagtattgaatttataaattattttgggttgtgtagttatttttatgatattgattttttttatttatgaatatggaatgtttttttatttgtttgtgtttttttttatttttttgagtagtggtttgtagttttatttgaagaggttttttatattttttgtaagttgtatttttaggtattttatttttttagtagtaattgtgaatgggagtttatttatgatttggttttttgtttattattggtgtataggaatgtttgtgatttttgtatattgattttgtattttgagattttgttgaagttgtttattagtttaaggaggttttgggttgagacgatggggttttttaaatatataattatgttttttgtaaatagagaaaatttgattttttttttttttatttgaatattttttattgtttttttttgtttgattgttttggttagaatttttaatattatgttgaataggagtggtgagagagggtatttttgttttgtgtcggtttttaaagggaatgtttttagtttttgtttatttagtatgatattggttgtgggtttgttataaatagtttttgttattttgagatatgtttcgtcgatatttagtttattgagagtttttggtatgaaggggtgttgaattttattaaaggtttttttcgtatttattgagataattatgtggtttttgttattggttttgtttatgtgatggattatatttattgatttgcgtatgttgaattagtttcgtattttagggatgaagttaatttgatcgtggtagataagtttttttatgtgttgttgtattcggtttgttagtattttattgaggatttttatattgatgtttattagggatattggtttgaaattttttttttttgttgtgtttttgttaggttttggtattaggatgatgttggttttataaaatgagttagggaggagtttttatttttttattgtttggaatagttttagaaggtatggtattagtttttttttgtatttttggtagaattcgtttgtgaatttatttgtttttggggttttttttggggtagtaggttattaattattgttttaattttagaaattgttattgttttatttagggattcgatttttttttggtttagatttgggagggtgtatgtgtttaggaatttatttattttttttagattttttagtttatttgtatagaggtgtttatagtattttttgatggtagtttgtatttgtatgggattagtggtgatattttttatattattttttattgtatttatttgatttttttttttttttttttttattagtttggttagtggtttattttgttgatttttttaaaaaattagtttttggatttattgatatttttgaagggttttttgtgtttttattttttttagttttgttttgattttagttattttatgttttttgttagtttttgaatttatttgttgttgtttttttagtttttttaatttcgatgttagggtattaattttagaatttttttgattttttttgtgggtatttagtgttataaatttttttttaaatatcgttttaaatgtgttttagagattttggtatattgtgtttttatttttattggttttaaagaatatttttagttttgtttttattttattatttatttagtagttatttaggaataggttgtttagtttttatttatttgtgtagttttgagtgagttttttaattttgaattttaatttggttgtattgtggtttgagagattgtttgttatggtttttattatttcgtatttgttgaggagtgttttatttttgattatgtggttaattttagaataagtgtaatgaggtgttgagaagaatgtatagtttgttgatttgaggtggggagttttgtagatgtttgttaggtttgtttggtttagagttgagtttaagttttgaatatttttattttttgttttattgatttgtttaatattgatagtggggtgttaaagttttttattattattgtttgggagtttgggtttttaagaatttgttttatgaatttgggtgtttttgtattgggtgtatatatatttaggatagttagttttttttgttgtattgttttttttattattatgtaatgtttttttttgttttttttgatttttattgatttaaagtttgttttattagagattaggattgtaatttttgttttttttttgttttttatttgtttggtaaatatttttttatttttttattttgagtttatgtttgtttttgtatatgagatgggttttttgaatatagtatattgatgggttttgattttttatttaatttgttagtttgtgttttttaattggggtatttagtttatttatattaaggttaatattgttatgtgtgaatttgattttgttattatgatgttagttggttgtttcgtttattagttaatgtagtttttttattgtgttaatgttttttataatttggtatgtttttgtagtggttggtattagttgtttttttttatgtttagtgtttttttttggagttttcgtaaggtaggtttggtggtgataaaattttttagtatttgtttgtttgtaaaggattttattttttttttttttatgaagtttagtgtggttggatatgaaattttgggttgaaaattttttttttttagaacgttggatattggtttttatttttttttgttttatagggtttttgtagagagttcggttgatagtttgatgagtttttttttgtgggtaattcgatttttttttttggttgtttttaatatttttttttttattttaattttggtgaattcgatgattatgtgttttggggttgttcgttttgaggattatttttgtggtgttttttgtattttttgaatttgaatgttggtttgtgttgttaagttggagaagtttttttggataatattttgaagagtgttttttaatttgattttatttttttcgttattttgaggtatattaattaaacgtagatttggtttttttatatagttttatgtttttttttttttttttgagatggagtttcgttttgttatcgaggttggagtgtagtggtgtgatttcggtttattgtaagttttattttttgggtttatgttatttttttgttttagttttttaaatagttgggattataggcgtttatttttacgtttagttaattttttgtatttttagtagagacggggttttattatgttagttaggatggtttcgattttttgatttcgtgatttatttattttagttttttaaagtgttgggattataggtgtgatttatcgcgtttcggtaagttttatattttttggaggttttgttcgtttttttttatttttttttatttaattttgttttttttttttattttattaagttgattattaagttgatttttaattattgttttattagtttggttattgatatttgtgtattttttatgaagtttttgtgttttgttttttagttttattaggttatttatgtttttttttatattggttattttagttaattcgattaatttttttttaaggtttttagtttttttgtattggtttagaatatgttttttgagtttgtagttttttgttattatttattttttgaagtttatttttgttagtttattaaatttattttttgtttagttttgtttttttgttggcgaagagttgtgattatttggaggaggagaggtattttggtttttggaatttttaatttttttatgttattttttttttatttttgtggatttatttatttttggtttttgatgttggtgattttcggatggggtttttgagtggacgtgttaattttttttgttttttttttttttaataggtttttttggtgttagtttgttggagtttgttggaggtttatttttgattttgtttgtttgggtattattagtagaggttgtaaagtagtaaagattgttgtttgtttttttttttagaagtttcgatttagtggggtatttgttagatgttagttagagtttttttgtattaggtgtttgtcggtttaagttagaaggtattttttagttagtatatatggggattagggatttatttgaggaggtagattgatttttagtagagttttaatattatgttgggaggtttattgttttttttagagttattaggtagggacgtttaagtttgttataagttttcgattggggttgttgttttttttatagagatgttttgtttagagaggagtaatttggtagtttggttatagtagttttgttgagttgtagtgagttttgtttagtttgaattttttagtagttttgtttatattgtggttataaaattatttatttaagttttagtaatggtggacgttttttttattattaagtttaattattttaggtgaattttagattgttgttgtgttggtagtaagaattttaagttagtggattttagttttttgggttttatgggcgtgggattagttaagttagattatttggttttttggttttagtttttttttttaggggagtgaacggttttgtttcgttggtgttttaggcgttattggggtatggaaaaaagaaaaaaagtttttatagttagtttagtgtttgtttaattggttatttagttttgtgtttgaaatttagggttttggtggggtagttattggagggaattttttggtttgtgggtttcgaagattgtgggataagtgtagtatttgtgttggagttttttaggtttagatttttatggttttttttgggtagaggggaaaatttttcgattttttgtattttttaggtgaggtgatgttttattttgtttcggtttgtttttcgtgggttgtatttattgtttaattagttttagtgagatgaatcgtgtgttttagttggaaatgtagaaattatttattttttgtttcgatttcgttgggagttgtagattggtgttgtttttattcggttattttgaattttgtttgtttatttttaatttttttttttagtgtattttttttttagtttaggttggaaaattttaattgttttatttttgagtttattgattgttttttttgttatatttattttgttattgaatttatttagtgagtttttattttggttattttattttttagttataaaatttttatttgtttttttttttttttttttttttagaaatgtttatttttttattttaagtttcggggtatatatataggatgtgtaggtttgttatataggtaaatatgtgttatgggtagtgtttatttatagttttattaatgttttttgtttttaagtttattttgtttgagagttatgttagtattttttttttttttaattatattttaagttttaggatatatatgtataatgtgtaggttagttatatgtttatatatgtgttatgttggtgtgttgtatttattaattcgttatttaatattaggtatattttttaatgttatttttttttttttcgttaattttataataggttttggtgtgtgatgtttttttttttgtgtttatgtgtttttattgtttaatttttatttatgagtgagaatatgtggtgtttggttttttgtttttgcgatagtttgttgagaatgatggtttttagttttatttatgtttttataaaggatatgaatttattattttttatggttgtatagtattttatggtgtatatgtgttatatttttttaatttagtttattattgttggatatttgggttggttttaagtttttgttattgtgaatagtgttataataaatatacgtgtgtatgtgtttttatagtagtacgttttataattttttgggtatatatttagtaatgggatggttgggttaaatggtatttttagttttagatttttgaggaatcgttatattgatttttataatggttgagttagtttatagttttattaatagtgtaaaagtgtttttatttttttatattttttttagtatttgttgttttttgattttttaatgattgttattttaattagtgtgagatggaattttattgtggttttgatttgtattttttcgatggttagtgatgatgagtatttttttatgtgttttttggttgtgtaaatgtttttttttgagaagtgtttgtttatatttttcgtttatttgttgatggggttgtttgttttttttttgtaaatttgtttgagtttattgtagattttggatattagttttttgttagatgagtagatgtaaaaatttttttttattttgtaggttgtttgtttattttgatggtagttttttttgttgtgtagaagttttttagtttaattagattttatttgttaattttggtatttgttgttattgtttttggtgttttagatatgaagtttttgtttatgtttatgttttgaatggtgttgtttaggtttttttttagggtttttatggttttaggtttaatatttaagaggatataaataaatggaagaatattttatgtttatgggtaggaagaattaatatcgtgaaaatggttatattgtttaaggtaatttatagatttaatgttatttttattaagttattaatgattttttttatagaattggaaaaaattattttaaagtttatatggaattaaaaaagagtttatattgttaagttagttttaagttaaaagaataaagttggaggtattacgttatttgattttaaattatattataaggttatagtaattaaaatagtatggtattggtattaaaatagagatatagatttttagaaataatgttatatatttataattatttgatttttgataaatttgataaaaataagaaatggggaaaggattttttatttagtaaatggtgttgggaaaagtggttagttatatgtagaaagttgaaaatggattttttttttatattttatataaagattaatttaagatggattaaagatttaaatgttttttttttatattttatatttgttgttaagatgttttattaaaaataatttcgaagttatttataattgtttgttggaatattttttatgatagttgttgtaaaatatttgtgagataattgtaatatttgtgttattttggtgttgatattgtttgaatttttttatttagatttttgtggtttttgataatgataggtgattttttgtttatatgttggatattttgaatatggtgtattgaggtttggtttttatttaatgtttttgttttagtaggtagttaatttgtttaggtttagaatatatgttttgatttatgtttatgggttatgatgtaaatgttaatttagtgtttaaagtttttatggtgttattttggtttgttttatttgtgtgttatttagaggttaatttgaagtttggtgatgttttatattattgttaagtttttaggttttgtggatgttatttttgattagtttttaaaatttttttaaaattatttatttatttttgagatagagttttgttttgttgtttagattggagtgtagtggtacgattttggtttattgtaatttttgttttttggatttaagtgattttgtttttttagtttttcgagtagttgggattataggtgcgtattattatatttggttaatttttgtatttttagtagagatggggttttattatgttagttaggatggttttgattttttgatttcgtgatttatttgttttggttttttaaagtgttgggattataggtatgagttattacgttcggtttatttatttatttatttatttattttgagattgagtgtaaaagtgtgttatttaggttggagtgtaatggcgttatatcggtttattgtaatttttattttttggatttaagtgatttttatgttttagttttcgaagtagttgggattataggtgtgtgttattacgtttagtttttgattagttttttatatgtattgtttataagaattttatatatagatttagaatattttttttttttttttttgtaattttattagttttatatattttagttgggatagagaagaaattgttttgtgattgtagggtaggggttttgtattttgtttttatagttgttgtattagatattttttgatttagaaattatttttttggaaatttaattttaggaaaaatttagataaatgtgtaaagagatatatatttattgtagtgttggtttaaatgaaaagataaagtttatttataggggagtgtttaaataaattatgtattgattaaatattatatagatatatattattatggaaaaatttttatggtatattgagtgaaaagatgtaggtatgtaagtttgaaatttatttggaaaaatgaagtatttatttgtatgtatatttaggtattgaagaaagttaatgatttaatttaaatgttaatagtagagttattttaagggatgaggatggttatagtaatttttattttttttttttttttttttatattttttagtattgtatgtttttaaatgattatgttttgttttgtatttaaaataaattataaattttaatttgaataaattagatttagttatttatttgatgattagtatagttttaattttaataagttttttattgttagttatttgatttttgtattttatgttgttttgtttgagagtagttttattaaaattagttttatttgaggtttttttttttttttttttttttttttttagaattgtttttttgtagaggagaaggattgagatatgatttttggtgaaattgaaggtataatttgaataatattcgttaatttggggagaataaaattttgaaagaagaaatttaattttgatgtttttttttaaaattaagggttttatattgtttgtaagataaataattaaagttttatttattatggtatttaagggattttttaattgggttttaatttatttttttgatattatttttgatattattttttatttatagtttagtaaggtttgtttatttattttcgttagattttttatgttgttttatttttgggtattggtttatatttattttttggaatagatttgattttattttttaaaatttatttttatttgttttatttaatttatgatttttttaaagtagattaaatattatttttttgtgaagtattttagtattttattagggtgaaattattattttttttgtaatattttgtttttaagttgtttgttattgtatatgatagttgtttatttttttttttttaagattgagatttttttagtaatttttgaatgatttttatgaattagttaagtttaattttggagaaataaagacgaaaaatatttggttttttatttttaggtgtatagaatttagtaaagcgggtaaacgtataaatagagaataattgaggtatataaaagtggtttgggaattgtgttgagggtagttttttttagtaggtgtttaggaagattttataaatgagatgatatttgatttgaatcgtaaataagtaggagtttgtcggatggataaaaggtagaatgtgagtttttttaatatttagttaaaagtgattggatggtggttagttttaatgtaattttttttatttagtgtatgaagatgtttataagttataaagtagtgtggttttattagaattgttattggattatagggtattttatatgataaagaagatgtttttttttatagttatttagtttattattgaatagatttgaaaggtgtaaagtttattgatatgtatttgattttttttttttttttttttttttgagatagagttttgttttgttatttaggttggagtgtagtggtgtggtttcgatttattgtaagttttattttttaggtttacgttatttttttgttttagtttgttatgtagttgggattataggtgtttgttattatgtttggttaatttttttttttttttttgtatttttagtagagatggggttttattgtgttagttaggatggtttcgattttttgatttcgtgattcgtttgttttggttttttaaagtgttgggattttaggcgtgagttattttattcggtttatttttttttttttaattttttttaggttggatagatatattttagtgattggtaaagtattttattaaatttggttgttataattttttttttttttttattttattttttatttttttattttatttttgtttttgtttaatttattttttgttggtttggaagttttttttgtttttagttgataaaaatttacgattaattttagataattttattatttttcgttagttattttgttatttaggggtgtttttttttttttaaaaaatagatttaatagatttaaatagatagttattatttggaatggattatatttaaataattatgaggaataattgtgaggaatttagttttagaaatttttgtatttagtaattgataaatagataagtaatgtattaatggaaaaaattcgattaaataataaattaaagttaattttttttttttttttttttttaagatggagttttgtttttttgtttaggttggagtgtaatggcgtgattttggtttattgtaatttttgttttttgggtttaaataatttttttgttttagttttttaagtagttgggattataggcgtgtattattatattcgtttaatttttgtattttagtagagatggggttttattatgttggttaggttggtttcgaatttttgattttgtgatttgtttattttggttttttaaagtgttgggattataggcgtgagatattgtgttttgttaaaaattttttttttttgagatagagtttcgttttgttatttaggttggaatgtagtggtgcgattttagtttattgtaagtttaatttttcgggtttacgttatttttttgttttagttttttgagtagttgggattaaagatttttgttattacgttcggttaatttttttgtatgtttagtagatataaggttttatcgtgttagttaggatgattttaattttttgattttgtgatcgtttatttcggttttttaaagtgttgggattataggcgtgagttatcgcgtttagtttaaagttaatgttttgattaagagtaaggttattatttgttattattaattaattaattaattaattaatttttgagatagggttttattatattgtttaggttggttttaaatttttaggtttaagtgatttttttgttttgttttttgagtagttggaattataggtgcgtggcgttatgttttattatttatttttaaatatattgtagaatatggaatttagggaggataaattttgatgaattaaataggtatagtgatatgggtagaagattggtttattttattataattttttaaatatatattgtgtatttgattaatgaaatgttaaaaataaatgtttagatattatttgatattaaataatttaattattaagtatgaattttatatttaaaaattttataaaatttttagagtttatatagataaaattttttattgttatgattattacgtataagtttgagtttttttttattttttttttttgagatagagtttcgtttttgtcgtttaggttggagtgtaatggcgtgatttcgatttattgtaatttttgttttttgagtttaagcgatttttttgttttagtttttcgaagtagttgggattataggtgttcgttattatatttagttaatttttttgtatttttagttgagacggggttttattatattggttagattggtttgaattttttattttaggtgatttattttattttaggcgtttttcgcgatgcggggagtgagagttagtttttttttttttgggttttttaaagtgttgggattataggtatgagttataaagtttagtttttttttattttttattatattgttgagtatagtattaattattttattaattgatatttatattgttatttaatttagtttgataatttttatttttaaaatgtggtattttttgtttaataggaaaatattataattttaaatatatatgtatttaatattggcgtttttaaatttataaaataattattattagatttaagaaatgatatatatagtaatataatattagtgggggattttaatacgttattgatagtattagatagattattaagatagaaagttaataaaaaaataatgaatttaaattatgttttggaataaatagatttaatagatatatatagaatattttatttaataattgtagaatatacgtttaattttttagtatatggaattttttttaggatagattatatgatagagtataaaataagttttaataaatttaagaaaattgaaattatgttaagtattgttttagattatagtgaaataaaattggaaattagttttaaaaggaatttttaaaattacgtaaatatatggaaattaaataatttgtttttgaatgattattgggttaataatgaaattaagatgaaaattaaaaaattatttaagttgaataataatagtgatatgatttataaaaatttttgggatatagtaaaggcggtgttaagaggaaagtttttagttttatatgtttatattaggaagtttgaaagagtataaatagataatttaaggttatattttaaggaattagagaaataagaattaagtttaaagttagtagaagaaaggaaataatttagattagagtagagttaaatgaaattgaaataaaaaaatatagaagtgaaataaaaagttggttttttgaaaagataaataaatttgatagattattggtaagattaattaagaagagagaaaatttaaagaagtttaagtagaaatgaaatgggagatagtataattgatattatagaaatataaaagattatttgaggttattatgaatatttttatgtgtataaattagaaaatttggaggagatcgatatatttttgggaagagaaaatttttttattttaaattaggaagaattagatattttgaatagattaataataagtagtaagattgaaatggtaataaaaaaattataaaaaaaaaagtttagggttagacggatttataattgagttttattagatatttaaagaagaattggtattaattttattgatattattttataagatagagaaagaaggaattttttttaaattattttatgaagttagtattattttaatattaaagttaggaaagaataaaagaatataataataataaaaaagaaaattgaagattaatatttttgatgaatatagatgtaaaaatttttaataagatattagttaattaaatttaataatatattaaaaagataatttattatgattaagtgggttttatagtagggatgtagggatggtttaatatatgtacgttaataaatgtaatatattatataaataattaaaaataaaaattatatgattattttaatagatatagaaaaagtatttgataaaatgtagtatttttttatgattaaaatttttagtaaaattagtttataagggatatattttaatgtaataaaaattatgtatgataaacgtatagttaatataatattgaatggggaaaagttgaaagtattttttttgagaattggaataagataaggatgtttatttttattattttaatatagtattggaagttttagttagagtaattagataagagaaagaataaaggtatttaagttggtaaagaggaagttaaattgttattgtttgttgatgatatgattgtatatttggaaaatttagaagatttttttaagaagtttttagaattgataaaataatttagtaaattttttggatataaaattaatgtatataaattagtagtttttttgtatattaatagtgattaagttgagaattaaattaagaatttaattattttttataatagttgtaataaataaataaataaattatataattaaaaaaatttaggaatatatttaattaaggaggtgaaagatttttataaggaaaattataaaatattgttgaaaataattatagatgatataaataaatggaaatatattttatgttcgtggatgggtagaattaatattgtgaaaatgattatattgttaaaagtaatttataaatttaatgtaatttttatataaatattagtattattttttatagaattagaaaaaaaaattttaaaatttatatggaattaaagaagagtttaaatagttaaagtaaggttaagggaaaagaataaatttggaggtattatattatttgattttaaattatattgtaaggttatagttattaaaataggatagtattggtataaaaatagggataaagattaatggaatagaatagagaatttagaaataaatttaaatatttatagttagttgatttttgataaagaaaataaaaatataaagtgggtaaaggatattttatttaataaatggtgttaggataattggtaagttatatgtaggagaatgaaattggatttttattttttattttatataaaaattaatttaagaaggattaaggatttaaatttaagatttgaaattataaaaattttagaaggtaatattggaaaaatttttgtagatattggtttaggtaaggattttatgattaagaattaaaagtaaatgtaataaaaataaagataaatagttgggatttaatttaagagtttttgtatggtaaagggaatagttagtagagtaaatagataatttatagagtgggagaaaatttttataatttatatatttgataaaggattaatatttagaatttataataaatttaagtaaattagtaagaaagaaagaaataattttattaaaaattgagttaaggatatgaatagataatttttaaaagaagatatataaatggttaataaatatatgaagaaatgtttagtattattaaggattagggaaatgtaaattaaaattatagtgtgatattattttatttttgtttttttgaattagggtttttttaaagaaattttttagaattagtaaaagtggggatgatttaggtattttgatttgtaaagttataaaattaagttgttaattattattgtagatgagtaatttatttttttaaagtatagttattgaattgattttgagaaatttttagagagaaaaaatttaatagtataaattaattaattgggaaagttagaatgttttttttgaattttttattaaaaaattatattatttgaaataatatatagttattaaattgttttgtattttattaagaaatagtttttaaagatgtagttttgttttatagttgtaagtttaatttttttttgtatagaaaggaaatattgtgtatttaatgaattatttatatagagtatttgttgttaattgttgttttagttatttatataggagtttgttttgaggtggtaatagtatatgggaagatgaattttttttgtttgtttattcgtttttttttggttgtatttgatgatagtataagatgtttttaataaagttttatgttttttttgaaaaaaaaattagaaaataatagaggttggtatagatgcggtgaatagggaatatttttatattgttggtgggaatgtaaattagtataattattatagaaaatagtttggagattttttaaagaattagaagtagaattattatttaatcgagtaatgttattagtgggtatttatttagagtaaaataagttattatataaaaaagatatttgtatatgtatgtttatagtagtataagttataattgtaaaaatgtggaattaatttaaatatttattagttaacgaatagataaggaaattatggtatatatatatggtggaatattatttagttataaaaaggaatgaattaatggtatttgtagtagtttggatgggattggatattattttaagtgaagtaatttaggaatggaaaattaaatattatatgtttttatttataagtgggaattaaattatgaggatgtaaagttataagaatgatattggggatttagtgggaaagggtgggaagggagtgagggataaaagattataaattgggtttattgtatattgtttgggtgatgggtgtattaaagttttataaattatcgttaaagaatttattagtgtaattaaatattatttgtttttttaaaatttatggaaataataaataaataaataaaaatttaagtaaaaataaataaaatgtggttatttagtttatttataattaatggaattattgattgatatatatgggtttaagattattttattgttcgttttttgtttttttatttgttttgtgttatatgtttttttatgtttttggttttttatttgtttattgagatcgtatttggttttgttatttaggttggtgtgtagtggtgtggttttttttgtaatttttattttttaggtttaagttattttgttattttagtttttcgagtagttggggttataggtgtatattaatatgtttagttaatttttgtattttttgtagagatggggttttgttatgttgtttgggttggttttgaatttttgggtttaaggaatttattcgtttttgttttttaaagtgttaggattataggtatgagttattgtatttggttttttggtttttttttggaatgatttttataaattattttatgattagtttttgttagttttgtattatgtattttaaattgttattgttgttatttagaaaatataaatatatttttgatgtgagtattttattttaaaatttatatatttaaattgataaataaaaattgtatataattattatgtataatatgatgttttgaaatacgtatatattatagaatgttaaattatgttaattaatatatattagtttatatatttattttttttttatgatgagaatatttaaaatttatttagtgattttttaagaatataataatgttgttttaattatagtttttatgttataaaatagatattttgatttttttatttattttatgaaattaaattttgtattttttgataaataattttttaatttttttattttttgttttttatttttttgtttttagtatttggtaattattattttattttttgttttttcgtttaattttttaagattttatatataagtgagattatgtggtatttatttttttgtgttttatattttatttaatataatgttttttaggtttatttatgttgttataaatgatagaatttttttgttttttaaaagttgaatagtattttattatatatatatatatatatatatatatatatatatatatatatatatatatatatatatatatatatatatattatattttttttatttatttgatgtaggatagatatgttttaaaattagagtttagtttaggaaagtttttgattttgtttaggaatgaatttaagggtaagttagtggttttagatagtaattttttattgaattttattgttttttgtagagtagggttaatttatagataatgtgttaagttggtaatgaatggattgttggtaattttatatttatttatatttatttttaattatatgttaattagtggtgggttaatgtaaattgaggagtagtttatttaaagttttttaggaaaggggtggtaatttttcggttattgttatgggaaggggtaataatttttgggtttttattatggtatttgaaaatcgttatggtgttggtgttttatattaatgagtagtgggggtaattagggattgtttttgttattatttgttagtttttgttgttttttttatttattttgttagtattaggaaataagttttgttagttttttattttattttttttttagatattagatatttttttttaattttaagggggttgaagaagggtggaggtttattttttgtaattgttttttgttgattttatgggtataggttttgatatggtttggatttgtgtttttgtttaaattttatgttaaattttaatttttaatgtcggaggaggggtttggtgggaggtgattggattaagggggtggagtttttttttgttatttttatgatattgagtttttacgagatttggttgtttaaaagtgtgtagtatttttttttttttttttttttttttgttttagttatgtaagatattgtttgatttttttttatattttattatgattgtaagttttttgaggtttttttagaatatgtatagtttgtagaattgtgagttaattaaattttttttttttataaattatttagttttaggtatttttttatagtaatgtgagaacggattaatatagaaaattggtattgggaagtggggtattgttataaagatatttgaaaatataaattttaaattatgaattttgggtgataataatatatatatatagatgagattatgaataaatattaggagaagtaaatcgtaattttagaaatagtaaatattagtaattggttaaaatttaataggttaattaggatattagatattgaaaagaaaattagtgaattggaaggtagatttgaggaagttgtttatattgtattgtagatagatttaaaaatatataaaaataaggttaatagaaatagagattagaatgagaagatttaaaatatatttgaattttagaaagagaatatagaaagtatggaggaaaagtaaagtttaaagaaagaatgtttaagaattttttaaaattgatgaaagatattattgtaaagttttaagatgtatttttttaaagtaggaataatgaaaatggattggatatatagtagtgaaattgtgtaatattaagataaagataaaattttaaatattattagatagaaaaagataaaataatttgtaaattaattaggtattaagtagattttttaagagtaaaaataaaggttaaaaggtaatggataatatttttaattagttgagaaaatatattgagttttttatttagtaaaattgttattttataatgaaggcgaagttaatttttttggtaaaagtttaagaatttattatttatagatttttatttaaaaatgaaattataggcggggtgcgatggtttatattggtaattttaatattttgggaggttaaggtaggtagattatttgaggttaggagttcgagattagtttggttaatatggtgaaattttgtttttattaaaaatagaaaaattagttgggtatggtggtatatatttgtagttttagatattcgggaggttgaggtgggagaatcgtttgaattcgggaggtggaggttgtagtgagttgagattgtattattgcgttttattttgggtgatagaatgagagagtttgttttatataaaaaaattaaaaaattaaaaaataaaaaaattaaattataaagtaaggattaagatataaagagaaatagtgagtaatattggtaaatatatgaatatatttgaaaaatatagattataaaaataattttattatgattaattttggggtgtataaatgtagtagaatgaaaatattagataataatagtaaagatagtggaatagtattgtaaaattatgtaatatggaaagtatttggtaaggtgttataaataaaattgagtaaattagtaattattataaatataaatggtttaaatttgttttttaaaagatttatattttaagatagggaaaaaggatttagttattttttatttataagatttattggaatttgaaaagtaaaataatagagaaagataaagtagaggaaaatattaattaaaaagttattatttaaaatagaatttaaattagaaattattatttgaaataaagaatattggaagtttttgggaaagatggttgaataggaatagttttggtttgtagtttttagtgagattaatgtagaaggcgggtgatttttgtatttttaattgaggtatttagtttattttattgggattggttagaaagtaggtgtagtttatggagggtgagtagaagtggggtgggttgttggtttatttgggaagtgtaaggagttggggattttttttttttagttaaggggagtcgtgagggattgtgttattcggattagggattgtgttatttggattagatattatgttttttttatggtttttgtaatttatagattaggagatttttttgtgtgtttatattattagggtgttgggttttaagtataaaattgggtggttgtttgggtagatatcgagttagttgtaatttttttttttataggttagtggtatttggaattttagtaagatagaattatttatttttttggaaagggggttgaagttagggagttaagtggtttcgtttagtgggttttatttttttagcgtttagtaagttaataattattggtttgaaatttttattgttagtatagtagtttgaagtcgatttgggataatttaggttggtgtggggaggggcgttcgttattattgaggtttgtgtgggtggttttttttttatagtgttaaggaagttattgggaagttcggattttgtagaatttattgtagtgtagtaaagtagttgtggttagattgtttttttagatttttttttaatgggtagggtatttttgaaagaaaggtagttttagttaggggtttatatgtaaaatttttatttttttgggatagagtatttgggggaaggggcggttgtgggagtagttttagtagatttaaatatttttgtttgttagttttgaagagaatagtagattttttagtatagtgtttgagttttgttaagggatagattgtttttttaagtgggtttttgatttttatgttttttaattggaagatattttttattagtggttgatagatattttatataggagagttttggttggtattagattggtgttttttgagatgaagtttttagaggaaggaataggtagtaatttttgttgttttgtaggttttattggtgatattcgggtaaatagggtgtatagtggatttttagtaaattttagtaggtttgtagaagagggttttgattgttagaaggaaaattaaaaaatagaaagtaataatattagttgggtatggtggtttatttttagaattttgggaagttgaggcgggtaaattataaggttaggagtttgagattagtttagttaatatggtgaaattttgtttttattaaaaatataaaaagtagttgggtatggtggcgcgtatttgtagttttagttatttgggaggttgaggtgggagaattattcgaatttggaaggtggaggttgtagtgagtcgagattacgtcgttgtattttaggttgggtaatagagcgagattttgttttaaaaaaaaaaaaaaaaaaaaaaaggtaataatattaatattaataaaaaaaaggatgtttatataaaaattatatttaaggttattaatattaaagatgaaaagtagataaatttataaagatgaggaaaaattagtgtaaaaatgtcgaaaattttaaaaattagaatgtttttttttttttaaatgattgtaatgtttttttagtaagagtataaaattggatagagaatgagtttgacgaattgatagaagtaggttttagaaagtgggtaataataaatttttttgagttaaaggagtatgtttaaatttaatgtaaggaaattaagaattttgataaaaggttataggaattgttaattagaataattagtttagagaagaatataaatgatttaatggaggtgaaaaaatatagtataagaatttcgtgaagtgtatataagtattaatagttaaattgattaagtggaagaaaggatattagaaattgaagattaatttaatgaaataaagtgtgaagataagattagagaaaaaaaatgaaaaggaatgaataaagtttttaagaaatatgggattatgtggaaagattaaatttacgattgatcggtgtatttgaaagtgataggaagaatggaattaagttggaaaataagttttaggatgttatttaggaaaatttttttagtttagtaagataggttagtatttaaatttaggaaatatagagaatattataaagatatttttcgagaagagtaattttaagatataaaatttttagattttttaaggttgaaatgaaggagaaaatgttaagggtagttagagagaaaggttaggttatttataaagggaagtttattagattaatattggttttttttgtagaaattttataagttagaaaagagtgggggttaatatttagtatttttaaagaaaataatttttaatttagaattttatatttagttatattaagttttataagggaaggagaaataaaattttttatagataagtaagtgttgagggattttgttattattaggtttattttaaaagagtttttgaaggaagtattaaatatggaaaggaaaaattagtattagttattgtaaaaatatattaaaatataaagattaacgatattatgaagaaattgtattaattaatatgtaaaataattaattagtattaggaggataggattaaatttatatataataatattaattttaaatgtaaatgggttaaatgttttagttaaaagatatagattggtaaattggataaatagttaagatttattagtgtgttgtatttaggagatttattttatgtgtaaagatatatataggtttaaaataaagggatggaggaatatttaataagtaaatggaaagaaaaaaaaaagtaggggttgtaattttagtttttgataaaatagattttaaataaataaagattaaaaagataaagaagggtattatataatggtaaagggattaatataataagaatagttaattattttaaatatatatgtatttaatacgggagtatttagatttataaagtaagtttttagagatttataaagagatttagatttttatataataataataatttttggatatatatatttttttaagattaaatttggaagaagttgaatttttgaatagattagtaataagttttgaaattgaggtaataattaatagtttattattttttaaaaaagtttaggagtagacggatttataggcgaattttattagaggtataaagaggagttggtattattttttttgaaattattttaaataataaaaaaagagggatttttttttaatttattttatgaggttagcgttattttgatattaaaatttaatagagatataataaaaaaagaaagttttaggttaatatttttgaagaagattgatgtaaaaatttttagtaaaatatatgtaaattgaatttagtagtatattaaaaagtttatttattatgattaagtcgattttatttttgggatgtaaggttggtttaatatacgtaaattaataaatataatttattatatgaatagaattaatgataaaatttatatgattattttaatagatatagaaaaggttttcgattaaatttgatatttttttatgttaaaaatatttaataaattaggtattgatgaaatatattttaaattaataagagttattcgtgataaatttatagttaatatattgaatgagtaaaagttggaagtattttatttgaaaattagtacgagataaagatgtttttttttattatttttgtttaatatagtgttggaaaatttggtcggggtaattaagtaagagaaagtaataaagagtatttaaataggaagagaggaagttaaattgtttttgtttgtagatgatatgattgtatatttagaaaattttatcgttttagttttaaaattttttaagttgataagtaattttagtaaagttttaggatataaaattaatgtgtaaaaattataagtattttatatattaataatagataaagagagttaaattatgagtgagtttataattgttataaagagaataaaatatttagaaatataatttataagggatgtgaaggatttttttaaggagaattatatattattgtttaaggaaataagagaggatataaataagtggaaaaatattttatgttcgtggataggaagaattaatattgtgaaaatggttatatggtttaaagtaatttatagatttaatgttatttttattaggttattattgattttttttatagaattagaaaaaacgattttaaattttatatggaattaaaaaaagggtttatatagttaagataattttgagtaaaaagaataaagttggaggtattatgttatttgattttaaattatattataaggttatagtaattaaaagaatatgggattggtattaaaattgatatatagattaatagaatagaagagaggttttagaaataatattatatgtttataattatttgatttttgataaatttgatatatataagtaatggggaaaggattttttaattaataaatggtgttgggaaaattggttagttatatgtagaaaattgaaattggattttttttttatattttatataaaattatttgaataaagatttaaatagaaaatttaaaatcgtaaaaattttagaaaaaaatttaggtaatattatttaggatataggtatgggtaaaaaagattttatgattaaaatattaaaagtaatggtaataaaagttaaaattgataaatgggatttaattaaattaaagagtttttgcgtagtaaaagaaatttgttattagagtgaataggtagtttatagaatgggagaaaatttttgtaatttatttatttgaggaaggtttaatatttagaatttatagggaatttaataaatttataagaaaataaaataattttattaaaaagtgggtaaaggatatgaatagatattttttaaaagaagatatttatgtggttaagaaatatatgaaaaaagtttattattattggtttttagagaaatgtaaattaaatttataatgagattttattttatgttagttagaatggtaattattaaaaagttaggaaataatagatgttggagaagttgtggagaaataggaatatttttatattgttgatgggagtgtaaattagtttaattattgtggaagatagtgtggtgattttttaaggatttagaattagaaatattatttgatttagtaattttattattgggtatatttttaaaggattataaattattttattataaagatatatgtatacgtatgtttattgtagtattatttataatagtaaagatttggaattaatttaaatgtttattaatgatagattggataaagaaaatgtggtatatatatattatgtagttataaaaaagaatgagtttatgttttttgtaggaatatggatgaagttataaattattatttttagtaaattaatataggaatagaaaattaaatattgtatgtttttgtttataagtgggagttgaataatgataatatatggatacggggacggggatattttatattagggtttgttagggtgtgaggggtaagaggagggagagtattaggataaatatttaatgtaggtggggtttaaaatttagatgataaattgatgggtgtagtaaattattatggtacgtgaatatttatgtaataaatttgtacgttttgtatatgtattttagaatttaaagtataataatataaaaagaaagaaagaatattattaaaattaataaaagaaattatttttttggaaaaagttggattttatatatatagaataaatattaaaaatgtataaatgtaaattgtatgaagtaaaattgtatttttttatatagtatattaagaaatttaagaaatggttagaaaattattagtaatgatatgagagtttgatgttatattaattaagataaatataaagattatttttttttatatttgttaaaattaattaaaaaaatgtaaaaattatatttataatgataataaaatattataggtatttaggagtaaatataataagaattaatatgaagaagtttgtaaattttttagaaagtattaattgtaaagttttgtgaaagtattaatatgaagatttaaattaatgaagatttatataatatttttgggtgaagtgattttagtaataataataatgttaaatatttttaaatagttaatttatttttagttagaatgttattttttttagaggggagttaggtaaaattaaagtttatgtggtggaatatattttaaaagagttaagaaaataaagaataaagagtagaatgagatatgtttaatagatatttaaattttttatatattttgtataattaaagtagtatgatatgacgtttttattttaattgttttattttataaaattgtaatattattaatatattgtatatttgtttgtgtattttattgtttatatatttgtttatgtattttatatataagttgataagtaattttagtaaagttttaggatattgaatatttgtgatttatatttgaaaagaataaatcgtaataaattattggattttttgatttatttagaattcgtttttgatttttggagggtaatgtggtttttgttgagaatgtatgatttaggggaaaaagaataattgattttataaatgttattgatataatttgatatttgttaagaaggaaaaaaagtgaaatttttgtttatattataaataaaatggattaaatatttaattgaagagaaatagaaaataaaaattataaaagagaaaaaaattaagtgattataaatatgtgtattatagtagttaaggagattatttatttatttatttatttatttattttattttatttttttaattttattttagatttagtaagtatatgtggaggtttgttatttgtgagtattgtataatgttgaggtttggaatatgaatgattttgttatttaggtagtgagtatagtagttaataggtagatttttaatttttattttttttttttttttttttttttttttgtttttagtatttattgtttttatttttatgtttatgtgtatttaatgtttagtttttatttgtgagaataagttgtatttggttttgtttttgtgttaattagtataggataatggtttttagttgtatttgtgtggttgtaaaggatattttatttttgttaatggttgggtagtattttatggtatatatgtattatatttttttatttagtttattattgatgggtatttaagttgatttcgtgtttttgttattgtgaatagtattgcgatgaatatatgaacgtacgtgtttttttggtagaataatttttttttgagtgttttatatatatatatatatatatatatatgtaatgggattgttgggttaaatggtagtttttttagttatttgagaaatatttaaattgttttttatagtggttgaattaatttatatttttattaattatgtatatgtattttaaagagattttttagaaagtttagaagttttcgaggataaggtagatatatttgattagatgaaatatatttttgtatagtaaaatgtatttttatttaatttattttatgttagttaataaatttttgatgagtatttattatgtgcgaggtatttttttaagtatggagatttagtagtgaataaagttttttagagtttatatttttgtggggtagaaagttaataaataaaaataaatatatgatgttaggtgataaatgttagtaataaagatatattagggtaaagagatagagaatggggggtattgttttatttagggtagttaaatttaagtatattttttaaaataattgagtagtgtatatgtttgagggggagtgtttaggttgattttgaagtaagaatatgtttggtaggtatgaggagaaatgaggaggttagtgtggttgtattaatggaagggagatggagagtgggtgatgaggttagaggagaagttagaagttagatattgtaaggtttttaaggttaggataagaatttttatgaagttgggtttggtggtttagtttaattttagtattttgggaggttgaggtaggagggttgtttgagtttaggagtttgagattagtttgggtaatataagattttatttttagtaaatttaaaaaataaaaaattagttgggtatggtggcgtgtatttgtagttttaattatttaggaggttaaatggaaggattgtttgagtttgggaggttgaggttgtagtgagttgtgattatgttagtgtattttagtttgggtaatagttcgagattttattttaaattaataaataaagaaataaaaaaataattttgtaatttttacgttgatgggggttggtttttggagagttttgagtagagaagtgattttatttgatttatattttgaaagtacgatttcgttgggagtggggagtgggattgggaagtttagtttggaagtaggtatagtaatgtaggtgaggtatggcgatggtttggattttttgatgaaggagatgagtagtagttagatttaagatataattttagggtataggttgatgaattggatgtagagaaagaatgagtagattgggaaaatatttttaatataaatggtagataaaaatttaatatgtaaaaatatataaaattgagtaagataaagggtaaattattagtttgaaaagtaattaaattataggagagaaaatttaaaatacgattaaatttatgaaaaaatgtttagttttattagtagttaggaaaatataattaaagaaatagttagatattattttttttaatagataaagattaaaaatagttatcgtttttagtattagtgtaagtatggggaagataggatttttatatttttttgtaggaatatgaattattataaatttggggaaaaggaattaggtaatatttattaatattaaaatatatattttttttgatttggtagttttatttttggaaatttattttagagaaataaaattttgattatatatagagatgtgtattgtagtattatttggtaatggtagaattatttagttaaaggtaaaaggttggaaataagttaaatgtttatttttaaggaaatggttgaataagtagtaatttatttatattattggatgttgtgttattaaaatgttagattgatgtgttgtttatgatgtattgttaggcgaagaagataagttgtagaattatgtatatagtttgattttatttttagaaaaaaatttttatatatatttatatttgtatatatttttatataaatatggattaagatgtggagagatttatagaaatttaatattgtgagtttttaatttttgaagagagaaatttaataaagatttgaatagaaaatttattgagatttagtttataacgtgtataatttgtagtgtggtattttaggtttgatttttcggttttggtaagtgtttaagtttttggatgatgatagataagagtgtttttatttttgaaatattaagattataggtttgtatttttttaaaattataattggaattttttaagtagagtgtaggaatattagttgttttttttttatttttgattgtttttaagggggagagtaaaggaattttattaaatataaaattgaatattttgattaattttttagtttatttttttatttttttggattttgttttttttttttatattttgttttttttttcggttttttgtatttatttttttgatatgttagttataatttagggtgagagatatttaggggaaaatgggaaattgtatttttttatttttattttttgagatagagttttattttgtcgtttaggttggagtgtagtggtacgatttcggtttattgtaatttttgtttttcgggtttaagtaatttttttgttttagttttttgagtagttgggattataggtgtgtattattacgtttggttaatttttgtatttttagtagagacgggtttttttatgttggttaggttggttttgaatttttgattttatgatttatttttttcggttttttaaagtgttggaattatagatatgagttttatatttagttaggaaattgtatttttaatgtattattaatttagggagtttttaattgggataggagtcgtattaattgattttatataaattgtttgttttttaatattttgtgttttttatttagttttattatttttaaatttatttttttgttttttttttttatgttttgtttttaaatgaaaaatgattaattgaattgatttttattttatttttgtgaataggatatttgatatttgtattagtttatttgtaaaataaaatttattattgattttttaaggtaagttttatatttttatttttatattgttattattttagaagtatatatttatgtatttttttaaaatttttattattttgttaaatatggtgttattttgatagtttgttttttttttttttttttgtttggggttttttaagatttttatatgtgtatttttataggagggttaataattgttttaaatttgttagttttttagtggtttttagaaaatggtttatagaatttttatagttggagtattttattgtatgatttatttgtttttaaagatttagtgggagtgtaaatgttttgattttaagttagaagttatggagaagatatagggaggtttttatagatttattttttttgaatttttgttttagtgggatatatatatagatatggagttagttgagttgggttgttgaagtttatttattgttttttagtaattgttttgataaggtttttgttttttattagaaatttgagagaagttgaattagttatatttttttaaaatttagtagtggttgggtatagtggtttacgtttgtaattttagtattttgggaggttgaggcggtggattatttgaggttaggagtttgagattagtttggataatatggtgaaattttatttttattaaaaatatattaattagttgggtttggtggtgtatttttgtaattttagttatttaggaggttgaggtatgagaatcgtttgaatttaggaggaggaggttgtagtgagttaagatttagtgtgagagatgcgagagggagagttttttggtagagggatttgttgaagaagttattgtgttagtttaaggaaaaagaggggggatcgaggtttaagggaatatatgaaggagtttttttattttttttgagtttttgggaggagaataaatttatttagttggagtttttttttgtaaatagttttggtatatttgagtaaatttaatagaattgagatagtttttaaaggttgggaaatttatttagcggttgtttttagtggtttgagtttagtaggtcggggttcgacgacgtgagggttttattatgttgtagaattttttttaagatagtcggtttgtttacggatttttgagtcgttgtttttttttaaataggaagggaaagagtggcggaaattttagtagaaaaattaagatataaaataattttatagattttattttgttaagattttttaaatagaagtaggagatatatagtgagtttttaaattatttcgttttgttgaggtaatttgtgagattttgattattttggttgtaattgttcgtaaggaggtatcgtagtttttgaattttttaaaggaaatgtggtcgtattttttttttagtgaagaatgcgtgaatttatttatttataaataataatttttgtaaatagagtattttaaagtttgtggaatatttaatatcggtttttgaattatgttataagggttgagtgttgattaatagtataagagttatattttttaaaaagtatttttagttttataagttttgtgaaaaagatgatgtaaatattgtaatttttatttgatggaaaagatattataattatattaaagaaagtttattgatttgaaagtatatattttttaatttaaatatgtttgatatattttaaaagaattattaatataatattttatttaggtggttagtataatttaaagttgtattaggtgttataatttaaatatatttattttttttattttgtttaatttatgttcgttgtttatttgttatttgtttgttttataaaatattaattgttatttaaaattatgtaaaatattttaggtaaatattatttttaaaatttaggtttttttagggaaatagtttgattgtatttaatattgaattagaaggttagtggtgttataaatgtaaatgaaatagagtatgtaatataatataatttaaatatataaaataagtaattataaaagtattttttttttatatttgagagaataaagttttgaatgaaaaacgttgttttgttgatgtgaaataaataaataatttttttttaaaaagatagatattaaggattttaattattttatttaacgaaatttgttatgtattaggtattattttaaggaatttataaatattgaagtattataatagttttatagggtgggtgttgttattgtttttatttatagatgaggaaaaagggatttgaagggatttggttatttgttttaggtacgtggtttttgagttatattggaaggtattttagcgtttatagtttttatttttggttttttttttagttgtttttgtttttgagatatttattttgaagacgtggttatttaggttgttagatgttaaatttatagtaatgagaaaatttaaacgaacgtaaaatgtatttttaaggtagtttgttgagagataaagaaaagtagaattaagataatgattggtttgtattttttggtagtaaattcgagtataaatatgaaatttagtgagttagaaagttttttatttgatttggtagaataaaattttaagaagaaatttttaataagattgatgaaatttaaatttcgtttagtgttgtatgttcgatagatttaatgaatattttttaatgagtattatgaaagatttttataaagtagagtagaaaattgaggtagttatttagaatagatttgtgattttgggagagttgtttttttagtttgtgttttagtttttttatgtttaaaataattttgaaggtttagtttattttaaaaatatttgtgattttagaatttatgtaattttagataataataataaattaagtagtttataaataaagagtttatggggttagtgtatatagtaagttaaatatgatttattttcgggatttagttattttagtttgatattttttgtttttttttatttttttttaggttattttttttttaagttgttgttgttggtaggtagttttatatttggggtattttatattttttatattttgtgttttgtattaaagtttttgtaatggtagaaatggttttgtttatgtatggatatggaagggatttgatattttttgggttaattttggattaatgaggtgtgggatttagtggatatttgtgttttttttttgttttttggtaaaggatttcgaggtgtattttatataattttttagaggattttggttagatagaatttttgggatttatagtagtggttagttggattttgtatttttgtgttggagtttaggatttattattttaaaatatggttgtagaagattagaataggttattttaaaatatattttttagatatattgattattttgagttggttatttggaggaattgtagatataagagtaattgaaaagttatttttttataagagaaatttatatttgataaaagaaaattttagtcgaattatgtttaaaagaatttaattgagaaatgaacgatttgtgaattgagtagtttttaagttcgagtaggtttagagattttagtgtagttatgtggtggaagatttatggatagaaagaggaaaatgataaacggaaaatggaagtgagatatagaaatagttggattggttataatttggtaatttgaatatggttagaatagttggttatatttgattggttaaaatttggtgattggtataagtgtaggttaaggtttgtttatatttttatttgttatagtttatgatgtatagagaaatttttatgttaagtttaaaatatgtaaggaggtagttttaggttaaatttgatttaatatatttataaggaaatttttgttagtaaaaatatttattaggaagagagttgttttaagataatttttattatttgagagatttttgtttttgtaattaggtaatttttatttattttatatttttttttttatttttttataatttgtttttattacgttttagaagtttaagttttaatttttttcggtagtttaggataatatttgagttttaattatttagttattttttttagcgttttatttttgggttttttttttgttaatttgttttatattaatttaattataaattagttaaataacgtagaagggtagaaagaagtatttttttttttttttttatatttgtattggttgttttttattttgttttattttttttattgtttatttttattttgttttggttttattttttttaaatataatatttgtatataattttttatttatgtataagtttttattttagatttgttttttaggataattttggttaagatattttttaaaataagtgtagttagattttattaatagatgtatatgatgtttagaattagggaggggatagtaattttttttataaattgattagttttagggtaaaattttatgtttagtattgttatcgtatttgaagaaggtattgataggtagaattggtttaggagggagtttttagaatttggaaaaattgaaagttatgttacggaatttagtagatagtattttgtagaatagtatttattagagagtataatttatattattaaatattagaagaatttgcgtataatgggtggaaaaaaataattttattaagttaattttagaagaaatgtttaatagtttaaaatttaaaaaagataaaaaggaaaattgttgtggtaggtagtatgtttttttaattagaaagaattgaataatttttggtatagagtttatagagggaattttttgatgggtcgaatttgatttttagaagaaagtatattgtagttttaatttaaaattcggtttttttgatggaaatttggtttgagttttaatatttttttatagaatatatatgaggtttttaatagtgttagaaattgataaataaaaatgagtaaaatgaaaaaaaaaattgattttgaaataaaacgagaaaatgagtttttgaatgagttaaatttatttttgtaataaatagcggaagcggtaagaatcgttaaagttgttttattaatgagaggagttttggagttgaagttatttgttaagtattagattagaattgagacgtattcgattgtacgtggtgttttgaatggaattttagaatatggaggagttgttttgagaatttaaaggcgggaaggagttttttgaaatttatttgtcggtttttaatttttttttatttttgtattttgtaagtagtattgtatgttgagtagatgaggaaaggattttagttttagaattttttttataatttaagtggtgatagaatttttttaagttgaagtttattttgtttttatgttaaaataaatgtgataatgttattttaaaaataaaagtatttttaatataaaatattgtttaattgggtatagtgtagttttggaaagatgtaataagtaggaaagttatattgatttgtttgttattattttaattgttgattttgttgtgttaaaagtgattgtggttgtgttagaagtgaagtagttttttagttgtaatgttaataaattttaagattaaataatattttgttaattattgagtttatgaggataagtttaaaagtagagttacgtttataattatatgttttaaagtattttgaagtaaaataagtttttaatttgtggttttaatattatatatttggtttttttttttttagaatgtattaaggaagtatattttttgtgttttatattattaataatgtataatttagggaataaaattttttggtaaattaagagatttaatataaataacgtaaagttgaaagtttattattatttatgtaaaaatatatttaaaggaagaaaaatatgatattttaatgaaggaaatgaaattaaaagttattgggtatttatttttttttttttaagttttttatatgtagatagaagaaaatgaatttatagggaagttgaggtttttttaatttcgttgttttttttttaatattttgttttggttgtgtttgtaagaatgaaggagatattggtcgttatttaagaaattttttttattttttttttttttttaagtaaaaatttattagtaatttggaatggtttaatattttttgttggtgttattcgggtattttttagaaatgttaatgaataatttattttggtattttagataaatataatttggtggtgttatttgggtattatttatatttgttaatgattgattttttttggttttcgtatgtaagagttaaatttatgacgtcgttgggggtttgaaaagtaagtaattagtttattttaggggaaatttgtaagttgattagttttaggtttaagttggtggttgtttaggtatggtttatttaatataagattggttaattggaataaaataaattttagttatttttattagcgttatattttaattgtgtgtaagtatttatttggtatttatttgtgtatagtgttgtgtttaatataatattaagtatggtaaatagatatagtttttgattttttgaggttttataatttaaaaggaaggggtagtagagataaatatattattagttaaattatatatatagtgagttaaattagtttattgtagttttagtgttttgtagatagtggtataggagaagtttttttaatatttattaagtatttgaagttagtttttatcgttgttttttgttgtttgtttggttgggttttttggtttgtttttttaaaaaagattaaaaagaagtatatttttgtatttttttttttttttttagaggaagaattgaagaatttagtttttattaattgtatttagttaattttagggattttaggttttgagattatagttttatttaaataaatttataagttaatgattgtaagatttatataagggtgaagttgttttattattttatttagacgaatttataagttaatgattataagatttatataagggtgaagttgttttgttattagttttgttttaaaggttgtattgttttgatcgttttatttttttagagaaatattttttgttttatttattttaatttttgtttttatttttttgtttgagaagaaatttttggaggaacgtagagtttatagatattatattttaacggtatttttgtgtttttagtatttgttgttaggaaattattttgaattattttggtaaaattttagttttggaagggttttgtttattttcgttttttcgtttttgttatggtgggagtgggggtgtggggtttagtgtttttagatgtagagaaattagtagggggttaattttttttataaatattgtatttttttttgattttcgtatgtattggaattaagggtaagaagttttttttgaagtttttttttcgttttttatttgggtattttagaatgtaggttaatttcggtttggtaatgaggagttttagtttggttaattgggaagatgttttgtgatttaagaaggttttagtattagttttttttagatagtatgagggtgttagttgtgtgtgagtttataagagtttgaaatttgggattgtatgtttttatttaatttttttttttttggttttggttgaaaaataagaaggttggtttatttatttatttatttatttgagacggagtttcgttttgtcgtttaggttggagtgtagtggcgtatttcggtttattgtaagtttcgttttttgggtttacgttatttttttgttttagtttttcgagtagttgggaatataggcgtttattattacgttaggataatgttttgtatttttttagtatagacggggttttattatgttagttaggtttgtttcgattttttgatttcgtgatttgttcgttttggttttttaaagtgttgggattataggtatgagttatcgggtttagttaaagaaggttggtttagataaggttgatattaggtttaaataatattaaattattttaattaatatattaaataaataagtaatagtttgataggtgatttgtggagatagagtttttttatattaagtatattagaatattaaattagtgagtttatttttattttttcgtaggtagtgtttagattagaattatgggagtaaaagttttttagtattttaagaaattcggttattcgtggagtgattattattaattattttaaagtatattaataaattttgttgattatttattttttaaagttagttatagtatttttaattaaaaaaaaaaaaagtgttttatttttaaagtaatttgttttttaatatattaatataatttatttatgatattgtttagggattaatataatataaggtttttggcgattttttttttttttgtaagttataaataggaagttgataataatttttgtggttttggatgtgtaaagtatatttgtggaataaggaattatttattattgtttaagttgtaggatgaatgtatgtagattttgatgtttttatagttttattgtagtaatttgaatttattgttaaaatatagtgagtatattttgatggacgttaattattttttattaattaggtattagatgagaaaattttagtttaggaaatttaggtaagttatttgatttaaagaaagaaaaatttttattcggttataaaagaaatttagattaaacgttattttagagttaaatagagtattgattattaaatatagattgttataaatttttgttgagttttggtgttaaaaaatatttagattaaatagtaataatgttttatttttttagggtattttttggaggttttttttattaaggaaaagatttaataatattttgtatttgtataatattatttaaattttttacgaatgttattagttttattttgtaggtgaaatagttttattttagaaagatgtttattgagattttataattggtaaagagaatatatatagtatttgttattatatttcgttataattaaagggagattggtgatttttttttttaggttgtagtttttagtagaggtatttgttggtgttgtaaagttatttaaggatcgtagaatttaagggatttttatttgttttttggtatacggatttgttggaagttttttagatagtagaatagtaaatggtatttagttttagttaagttatagaaaaaatgaaggtatggatagtttttaagttttattgtagaattaaatatatatatgatttatttatgttgttttttgattgttggtttattttaaaataaaaatatttaagtggaggaaatatttaaatattaaatggaatattaagatattgtaattttttttagtttaattgaatattttaagtatttagtgtttaatgagatttttttagtttaggttagaagagttaaaaagaaagttttttatagttgtaggggttgggttttaaattgttatgtgatttagaaataaagttaaatttatttatttttatatataatttttttagtatttttaaatgaaaatatgtttatttgattagtttgttataaaatagggttatataatgtattttagaaaagtatttaatttttaaaggttgttatttaataatttttaggagataattgtgaatatttttaaataatttaaatttaaagttgtttaaaagagatatagtgtatatgggttaagataataaatttgttatatttaagggaagtattaatttaggtgtattttagtaaggatgtttagtgggatattttttttttaattttatttattgttaagtttgtgtaaatgtttaaagaggttttaatataattttgttattagattttttgagttattagttattgttagagtttttggtttggtaatataatagaaatattgtaatggttgtataattttgagttatattggttgtttgtattagttgtttgtttacgtcggttttaaaattttttttattttttttaaattaaataaatgttagaatgggttttttttttttttttattttttttttttttttttttttattttttttttttttttttgttattttttttttttttttttttttttgtttttttttttttttttttttttttttttttttttttttaattttttttttttttttttttttttttttttttttttttgttgtgttttagttttttttttatttagttttgatatttttatgtgtttggtttatttttttttaataatgttagagaaagaaaaggttagtagttgtttttgtgtgggtttttttttttttgtttttttaaatttattttttttggttatttttttgttgtttttttattttcgtttttattttattattattaggaaatagaagagggaggagaaagagaggggaaaaaaaaaaagattaagacgtaagttggttagataagtttgtgatcggtttttttattagttttgaatgagggtataaggatataaaggtagttcgttttattggagttagcgcgaggttggtgggagttttggtttgattgtatgttattcggagaaagggtgttttattaattatatattaattatgtgtattgagtagaaggtagtagataaaaaatgtagatgtttttgtagtttagtagaatgagaattgtttttgattttgttaaaagaatattttgaattaaaggggttttatgggatttagagagttttgtggtttagtgttatggtgtggttttttaattattaaatttttttatagtggtgaaatgaatatttattgttatggttatattaatgaggttatttaatttggtaaaaagggagggttttgttatatggtgggagcgtaatgaaagaaggggataggtttatagttttgtggaatttagaagataataataaaaatgaattataaagaaaagattggtttaggttagtttggttaaattgtttttggttgtaatatttttttattagttaaatattagttttttttttttgtttttagttagtgttttattggtttcgtttaatttttattgttttttaagtgtaggttatttaggaaagttgattggaaatggtattatatttttaattatttttttatagttgtgggagagttattagtattggtagaagaaagaagttgtattttttcgtttttattttttgtatttggtttaattatgtagtttatgttaggaagtaagagttatggaagaaattatttttaattttaattttggaaaggagtttgtattttggttggttttaaaattataggtttttagttatattttttttttgaatattttttgtgatttttaagttttattattttttttttttatagtttttagttaagaaagagaaatattcgattttttaatatagttttttttattttttttttattgtagtaaaatatatattggtatgaaatttttgttatttttttatttttatttttaattttttttttagagataagattttattttgttatttaagttggagtgtagtggtgcgattacggtttataatagtttttaatttttggggataagtgtatattattatgtttagttaatttttttaaattttgtggagataaggttttattatgttgtttggattggttgaatttttgggtttaggggatatttttgttttaaagtgttgggattataggtgtgagttttttgtttagttatattttagttttttttttttttgagatagagttttgtttttttgtttaggttggagtgtaatggcgtgatttcggtttatcgtaatttttgtttttcgggtttaaacgatttttttgttttagttttttgggtagttgggattataggtatgtgttatcgcgtttggttaattttgtatttttagtagagacggggtttttttatgttgattaggttcgtttcgaatttttgattttaggtgatttattcgtttcggttttttaaagtgttgggattataggggtgagttattgtttttggttattttagttatttttaagtggtatgtttatatggtatgaaatttattattttaattatttttaaatgtatagtttaatggtattaagtatatttatattattgtagaattattattattatttatttttagaatttttttattttttttatttgaaattttgtttttattaaataattttttggttgggtatggtagtttatgttgtaattttagtattttggtaggttaaggttagtggattatttgaggttaggagttcgagattagtttggttaatatcgtgaaattttatttttattaaaaatataaaatattagttgggtgtggtggtggatatttgtaattttagttatttgggaggttgaggtaggagaattgtttgaattggggaggtagaagttgtagtgagttgagattatgttattgtattttagtttgggtaataagagtgaaattttgtttaaaaaataataataataatttttgtttttttttttttttagtttttggtaattattattttattttttatatttattgaaggggtagaaaagtgtggtatttttttttatttattataagagttatcgttaatatttttgtaataaaagataggttaataagagaaaagtataataaatttatttaattaaagttttatgtgatatgagaaatattagaaatgaagatttaaagatttaggaaaaattgtttatttttatgtttaggattaatgaagaatgaatagttatgtagaaatgttattggattaaagggtatgatttaatggtgataggttgagggggaaatttagtaaggtttgtttgtttagattttttttggtttttttgtgtagtttgtttttattttgggtttgggtaggatttttgtggaatgaaggtttttaagagagagtgatttttttaggttatggtttgtttgggggaaaagaggttttagtttttatgatttattttgggaaagaggaattttggtttttatgatttattttatgggagaaagagaggcgagaaataggaggatgggagagggttagagagattgtttttgagattttttaatttttttttgtttaaagtatttagtatgttaaggtgttatattttggggtattatgttttagttttaatattataaatttgattattttagatattttaaataagtagaattatataatatttatttttttttgattggttaattttatttagtataatgtttttagggtttatttatgttgtagtgtatgttagaattttttttttttttaaggtttaaaagtatttatttatatgtgatatggtttggttttgtgtttttaattaaattttagattgaattgtaatttttaatgttgtgggaaggatttggtgggagggatttggtggtggaaggatttgggattatgggggttgagtttttttttgttgattttttgaatgagttttggttgtttaaaagtgtgtagtatttttttttttatttttttttttttattggttatttgaagatatgtttgttttttttttatattttattttgattgtaaattttttgaggtttttttagttatgtttgttgtgtagattgtagaattgtgagttaattaagtttttttataaattatttagttttagatagttttttatagtagtattataatggattaatatagtatttatgtattagattttgtttattcgttgatttattaatggataatagggttgtttttattttttgatttttgtgaattatgttgttataaatatggatgtataaatatttttttgagtttatattttttttttttttgggtatatatttagaggggaattgttagattatattataattttatgtttaattttttgtggtattaaaatattgttttttatagtggttttatattttgattagtaatgtataagggttttaatttttttttatttttgttaatatttttttgaagttaattattttaataggtgtgaatggtattttattgtggttttaatatgcgttttttataaagaaaatatggtatatatatattatggaatattatgtagttattaaaaattatgttttttgtagggatatggataaagcgggaagttattatttttagtaaattaatataggaatagaaaataatatattatatgtttttatttataagtgggagttgaataatgagaatatatggatatagggaggggaatattatatattagggttttttggggggtggggcgtaaggggagtaagagtattaggataaatatttaatgtttgtagggtttaaaaatttagatgataggttgataggtgtagtaaattattatggtatatgtatataatgtaataaagttgtacgttttgtgtatgtattttagaatttaaggtaaaatttaaaaaagaaaaaaatgcgtttgttagataattggtgatgttgagtatttttttatgtatttattggttatttatatattttttttggagaaatatttatttaagttttttgtttatttttgaattgagttgttttttttttgttaagttataggagttttttaaatattttgaatattaatttttttttagatacgtaatttgtatatgattttttttattttatgggttttttttttattttgttgatattgttttttgatatataaaatattttaattttgatgaagtttaatttttttagtttttttttattgtttttgtttttgatgttatatttaagaaataattattaaatttattgttataaagttttttttttatatttttttttaagagttttatagtttagtatttatatttagatttttgatttattttgagttaatttttttatgtggtataaggtaagggtttaattttatttttttttttatttggtagggggataggggtatgtagatatttagtttttttaatattagttttgaagattattttttttttattgaatgattttggtatttttgttaaaaattatttagttatatatataagggtttatttttgggatttttattttattatattggtttatatgtttgtttttatgttagtattatattgttttgataattatagttttgtagtaagttttgaatttagaaagtgtgaaatttttgtttttttttttttagatagttttgattatttgagattttttgagattttatatgaattttagattggatttttttattttttatagaaaatataattgggattttgataaggattgtattgaatttttagattattttgggtagtagtgataataatattttttttaatttatgaatatggaatgtttttttatttattggtattttcgtttttttttagtaatattttgtagttgtataagttttatttttttgttaaatttattgttaagtatttaattttttttatattaatataaatggaatttttttaattttttttttaggatatttatttaatttagtttttaattaggaaaaatatagaatttttattaaatttttatttgaattttattttaaagaaattggtataatgaagtgtgtagaggttgattagaaattattttttaatttttgtttttttagttagggaaagttatgatttgtttttttaggttatgttttgttttttttggtaggaagttattagtggaaatataaagtttaatggaatttttcgtttttttttttttttttttttttttttttttttttttttttttttttttttttttttttttttttttttttttttttttttttttttttttttttttttttttttttttttttttttttttttttttttttttttttttttttttttttttttttttttttttgttttttttttttttttttttttttgttttttttcgatagagttttatgttgttttttaggttggagtgtagttatataattttagattattgtaatttttgttttttaggtttaagttatttttttaagtagttgagattacgggtatgtgtgtgttattatgtttagttaatttttgtatttttagtaaagatagggttttgttatgttggttaggttggatttaagtgatttatttattttggtttttattataggtgtgagttatttattgtgttttgttttggaattttttttaagtatgataatattaagatattattgttatgttagaaagtagtttttatttatattatttaataggttagaaatttattattaattttgaaaatgaaatattttgaagttaggaagtttttaagtaacgttttcgaagaaaattgatttatttatttaaatatttcgatgaatgttaatataatttgtaaataagtataaaaataagtagtttattgattttatatttttatttgaaagttattagttatataaacggtattttttttttagattttttagggggagggtgttatataatgtatatagattttatatattatattaaggtaataattttttttttttaagaaaataagaatattttatgatatgtagaataagaggatgtgtgtgatgtgtgtgtgttttgtagaaagatatttttttttattttgtagatagtgatataatttagttatattaattttcgttaaatttaaatattagatgaaaaatgaattagttaagtatttttgtttttggtttattgataatattttatatgtttatatttttatatttttttttttatgagataatatgttttttttaaaaaaattttttataagtgtttttttttaaaagaggttatagaaatagattttagtagtattacgtgttaaataattttataaaattttagatagatatatattattttaaagatataattttgttgatttgatattataaaggaaataaaaaataaaaatatataaagaaaatttagtaaataggaatagagaaagagtttggtttttttggtcgtttaagaattaagttttataagttatagaatgatataatttattttgtttttttaattttaatttgaaaagaaaatgtattaaagtgaaaagtttggttttatattagttcgtggtatatgtgttttttagtatttttatttttaaagtgagtattaatattttttggttgtcgtagtagtagtgtattttaaggtattttatttttattttttagaaaattattgtgatatatattttattagaaaaaatattttagtgttatttgatagaaaaatataataataaatatataaatgagcgtgtttataatgtaattagggttttttttaatgtgttgttttgtgtagtatatagtttgaataattgtattaagatagttttattttttgtttgtttgttgttttagggtaaaaattttggaattatttatgatattttttatttttttatgttttaaatgggatttattgttagattttgtttgttgttattttaaaaatatttaggatttaattatattttaatatttgtatagttattattttgttttaagtttttattatttggattgggagtttgtaaattatatagttagggttataggagagataagtttggcgatatttatttgtttatttattgtttgtggttgtttttttgttataatggaagagttgagtatttgttatagtaattatatggtttgtaaagttaaaaatatttattagttggttttttaaagaaaaggtttgttgatttttgatttagattattgtagtggttttataaatttgtttttttgtttttatttttgtttttttaatagagtagttggaaataggttatggtatttttttgtgtaatttttagtggttttttagagtaaaaggtaaggtttttaattagtattttttttattattagtagagttgattgtttgatattttttagtttatttttttttattttttttttgttaattttgttttttatggtagtttttggaaatatgtttagtatgttttttttttatttgttgttttttttattaggagtgtttttttttttaggtggttgtatggtttagttttttttaaagttattttgtagagaggttttttttgaaaattttttacgaagtagtattttattttattttttttatttattttttttgttttattttttttttttttaattaaatttaattttattttatgttttgggatatatgtgtaggatatgtaggtttgttatataggtaaatttgtgttatggtggtttgttattaatttattatttagatagtaaatttagtatgtattagtaatttattttgatgtttttttattttttatttttttgatagattttagtgtgtattgtttttttttttgtgtttatgtatttttattatttagtttttatttataagtgagaatatgtggtgtttggttttttgtttttgtgttagtttttcgaggataatggtttttagttttatttatgtttttgtaaaggatatgattttattattttttatggttgtatggtattttataatgtatatgtattatattttgtttatttaatttattattgatgggtatgtgggttgattttatgtttttgttattgtgaatagtgttgtaatgaatatatgtgtgtatgtatttttataatagaatgatttatattttttggggtttgttttatttttttttattttatttatttttggttgatttggattatatttatttgttagtgtattttttgttttttgttattagaagtaaaaagtgaatatatggatataaggaggttatgtttgttttttttttttatttgttagtttttaatattgataatatagttttgattttttgtttgaatttttttttattttatttggttggtaggtttgggttttttttgattattagataggtttttttcgtttgttgtagaggtaaaattaatttattgataacgtggtattttagtaaagaaaaaggttggttacgtgggagaattgaagttattatttaaattaatttttttgaaggtttagaggttagagtttgttaaggatagtttggtggataggggattagggagtggggaatgatgattgattttgtttgggatgaaattatagagggtgaaagtgagttttttttgttgtttttagtttttgagtgggattatagaattagttgagtttatttattggtttgggtggtattagatggtttattagaaagtaaagtttgaaaaatatttcgaatattaattttaggtttaataatggtgatgttatttatatgtataattggggagtaattttatggatgttattcgtaggaatttcggggtttttggttgtattatttttgtattatagtttttaattttgtggttaatttgttagttgtacgaaggtggtttggtttttaggtaagaagaggatttgtttggggaaggggttgttattattttagttttaaagttaaattgtaaattaaatttttattaaagttagtttagtttatgtttagaaatgaataagggtagtttggtagttaaaagtaaggtgtggtggttaggttagattttttttattgtcgtaatttttttatgtttaattttttttattgttataatttttgtaaaggtgattgtatttttttttttgaagttttgttaaatttttttgtatagagaagatgttatatgagtttagggtttttgttagtttttagtttatttttttaagttatatggtttggtgtttttattttgagatggtgcgggtggttttggggaagaatttaagttttttatttttttggttttatttttttttttttaattatttattttttagttttaagaaagggtttagaaaaggtaattagtggtggtaatggtgtgtgtgtggcgggggtagggtagggggtagggggtagtttttatttataggattaataggatagggatagtttttttaatatttgtttttttaaattgtgtttttttttaaattaaatttttatttattgttttaaatagtgaataatattaattttttgttttttttttataaagtaataaaatgttgaattgtagtgttttgttttttgtttgtttgttgttgttgtttttttttttttttttttgtttttaagtaaatataaaggtggttggggagagggttttatacgtttattagtaatttttaaatttttttttttggtggtttatttttttttttttagttttttttaagttgtaggttattagtaagatttgtttagattttaataaattagagtttttaattttaattttgtgattgatgaagtttgttgttaatgagatagtaataagtttagtagggtatatttttggaaagttttattttataattttgttggttattaggatttttttcgaaggtttgatttttgatggtttatttttttatggattttatttattttttgttgttgttgtggttgtttatattattacgttgtgtgtgagaaagagatatttgagatatttttttgattttttaaatttaagttagggtatttttttgaattgagtatttataatgtgtttattttatttttatttttgtatgttatttgtgtttgtatatgaatttattgtattatgagtttttaagggaaaaattttatattttatttatttttgtgttttttgtgatgtttaatatattgttttagatatgttgttattttaaaaatgtttattgaggtcgggtgcggtggtttatatttgtaattttagtattttgggaggttaaggcgggttgattacgatgttaggagtttgagattagtttggttaatatggtgaaattttgtttttattaaaaatataaaaaattagttagatgtggtggtaggtgtttgtaattttagttatttaggaggttgaggtaggataatcgtttgaatttaggaggtagaggttgtagtgagtcgagatcgtattattgtattttagtttgggtaatagagtgagattttattttaaaaaaaaaaaaaaagtttattgaataaattaattgtttaaatatttgtgtttttaatttatgtaaaaatagatatatttatggggggttttaatattttatagttgaaagatgttataatttattatgtgttttgttttaaagaaaagaataatattatttatattttattttatattttattaatattgtttaaatgtaatttttaaatataggaaaaggaatataaaagtgagattttagattcgtaagttgagtatttttagtaaaatatattttagttttttgttacggtagaaataggttattagtaatattttttgttattgtaatttttaaaagtttaaataatattcgttagaattgtgggaatagagtattttatttatgtatttatgaaaaatagagaagttgttgaggatatttatgtaggggagagtatttaattagtatataattttgtataggttgtaagttaaataaaattttggtgtatttaatatttgtaaattgttataagattgttgtaataaaatgtgggttatatgattatataatgcgtatttttatatgtggaaattaatataagtatttttgaaagaaagttattgatttaatttgtgttattatagcgtttttgtgtgatataggttaataaaaattaaatgtttaagagatttaggagaatttgagtattttatagtttttttatttattttaagattgagtaaaagtagaattgttattgggttgagttaaaaagggagatattgagtttaagtaaggtgagtttgagaattaagttttagagtagtgagatattagggttaattaggttttggaggaagatgtttaaaggaaattaggaaatggttgagaatagatttggaaaaaagagtggtgtatataaggaaatcgtttattaggaaagattatttgtttagtttgtaaaggggtaaaatgttgaatgtttaatatattagttggtatttttaaaattagaaaatttttatataaaagtttgtaattattatttggtgtaaaagtttatattttggaaaaggtttatgtaattttaaatgatttggttttttttttttttttgttgttttttaaaattggtagggtttgtttttgttttagggttttatttttatagagttttttttatttgttttaagttttaaattatagtttttttttggagtgtatttttgtatgttggttttatttttataatatttttgatgtgttttttttttatggaatataaagtttaattataattaaatatatatttagattagtgtttggtatttagtatgtatttaattatttaatatatatttattgaatgaatgaatgaaaaaaatagatatattttatagaattgaggttattttttaaaaatttttaaatgttttttagagatagggatttattatattgtaaaggtttgatttgaattattgggtttaaacgatttttttattttagtttttcgagtagaagatgttattttgagtttaggttaatttgaaagttatttttataagtagaaattaagttgaatgttgtgaatatttttttattttttgtatgggttttttgttgtgtttggattgttgatttttttttttttttgaaattttttattttatttttttttgtaaaattttttattattttttttatggtgttttaattattttattttttttttttgagtttttttttttttttatttttttttattatagtagtatttttaagagatatttttagtcgtggtttttttattttttttatggatttgttgtttttagtaattgtgagtatagttttatggatttaattatcgtaaataggtattagggaaatattttaattttttttttcgttttaggatttttttttgaattttgaatttatttattttgttattttattagtatttttagttagatattttataggtattttaaatttattatttttaaaatttattatgttattgtttttttagttttttttttgtttttttttttagtatattattatttgtggattatttaaagatgtaattttaaggaagtttatagtgggataaaattgtagggatatatttaagatagttaggagaattttagaaatgagaatgagagagaaattttgattaattagtgtttatagaattggttaaaagggttttttggttttgggtttttgttgagattttttttgggttttgttttgttttttaggttggagtgtagttgcgtaataattatagtttattgtagttttgaatttttgaatttaagatatattttagttttttagatagttgggattataggtatatattattacgattggttatttaaaatatatatattttaagtagagatcgggttttattatgttatttagtttgggttttgattttttggttttaagttatttttttattttggttttataaagtgttgggattataaatataagttatagtgtttagtttgttataaatttttaatttttaataattagaaaagaaattgggaatgaatattagaaatattttgtaatgattaaaatgtgttgtttgttttgtggttttattagagattagtgaagtttagcgtgattggcgaagacgttttagttataatgaggatttttttaggtagtagtaattgttaattttataggagattttaaggtagtttggtaagtttatttttttttagtttatttagtttttttagatttttattatatatttttttaattgtttttagatttttaatatttttattttttttatttttatttttagttttttttattgagttaaaacgaaatatttagaaaagaaggttgtaaagtttttattataatttttatttatttgcgtgtttgtgggtttaagtgtttttttattttttttgttatgaagggtagattttgtttgtttttttttgttttaggttaatttttttataggggtacgagattttatttgtttttatttgtttggaatattatttttgtaatttttttttttttttttttatttttgtttttttttttattgaattattttatgaggagtaaatatattattatttttttttttttttagggaaaaaaagattttttttgatttatttttttttttagttattgtttgttgatttttttttttttttatagcgaaaatttttgaaagatcgttttgtcgttgttgttttttttttttttaatattaatttttttttttaatatattttagttaagtttttgttttttagttttattaaaagtattgttattaatattataatgttttttatattgttatatttatggtttatttttaattttaattttttttgattttataagtaatttttaattaagttgattatttttttttattgaaatgtattttaaagttggttttaggatattattattttttgggttttttttttattttattagttgtttttttttaggttatttttttggtttttgtttattatttttttttttaaaattttaaagaatttggaggtattttttggattattggtttaggttatttaagtttgttttatttattattttagttgtttcgcggttttttagttgtagagttgtaagtatatttgtttatttgatatttgttttggatgtgttatagatattgtaaatttaatatgttttagatgtaatttttgattttaatttaaaatttgttttttgttatttgttttttttttaataaggaaaaatttttattttgtaaataatagaaattttatttttttagttatttaagttataatttggaattgtttttgatttttttttttttatatttaatttattagtaaattatgtaagttttgttttagtttatttagaatgcgattttttcgtattgttgtttttttattgttttagtgtaagttattatttttttttggattatttattgttaatatattaattatagtgaatttgttaaaatataagtaatgagttttttttttttaaaatttatattatgatttgtgtgtttttttttatatagattatattttaataaagagagatttttaaaaattttttagtggttttttattcgatttagaattaaaaataatttttttataattgatttatttttattttattatatgatatttttgaattttttttttgttatatttgtttttatttatttagttttagttatattgttttttttgttatttttaagttgtattaggtatatttttgtattatagttattgtatttgtagtttttttttttagagttttttttttttatatgtttgtatgggttgatttttttattttttttagatttttatttaaaattggttttgtttatgagagtttttttggttattaagtttattattttaatatattttttttggatatttttgtattttttttatttgatttttttttttttttttatttattataagtttttgtttgtttgtttgtttgttttttaagatagggtttcgttttgttatttaggttggagtgtagtggtatagttttggtttattgtaattttcgttttttagatttaaggtaatttttatgttttagttttttgagtagttgagattataggcgtgcgttattatttttaattaatttttgtatttttagtagagatggatttttattattttggttaggttggttttgaatttttaattttaagtgatttattcgttttggttttttaaagtgttgggattatgggtatgagttatcgtgtttagttaattttttatagtgtagattattttatttatttgtttatagttattttttttattagaatgtgaatatgagggttgatttttttgattgttagtttatttgttgtattttgagtattaaatatttataatagtagtaatttttatttatatagtatttagtattttttagtttattagttatttttaggtagtattttagattatatatataaaaggaagaggtaatgtgattataaaggtagagattggaatgatgtagttataagttaaggaatgttggtagttattttgttttttttaaaaattagatgtatttgttgggagcggtggtttacgtttgtaattttagtattttgggaggttgaggcgggcggattatgagattagtttggttaatatggtgaaattttatttttattaaaaatataaatttttattaaaaatataaaaattagttaagtatggtggtgtgtatttgtagttttagttatttgggaggttgaggtaggagaatcgtttgaattcgggaggtagaggttatggtgagtcgagattatgttattgtattttagtttgggtaatagagcgagatttcgttaaaaaaaaaaaataatagatagtttatagtaaatgatggtggattattatgataatttgttatgatttatttgatttttgaaggggataatgtagatgttattataaacgtggtatttttagagtaatagattaatatagtatattgatttgttgaatgtattattttttattttattagtagggaggattaaaaaaagttgatttttttttaataatggtagtcgtatatgtttattttgtttttttagggtatagttaatttttttgtttgttattatgatatagtttttaaggtttttagttttttatagtttatatagtattatgttaggttattatattgatgatatattgtaaattggatttgttaagaagagagtggtaaatgttagatatattttagtaaagttatagaatagaagataaatttaatgaagttttaggggttgatatgtaatataatattttaatattagtggttaagggtttttggatatgttgggataatttttgtaagatagagtattagtagttgtgttttatattttttgttattaataaagaagtattgtatttatttgatttatatttttaaattgtggaggaataattttattttggtaacgtaggtagttaatattatagttttttatattaatattattttttgtaaggaaaaaaaaagtttggtaatatttaatggtgtagtggatgtaagatatatattttttatatgttttttattagagtgtaaattggataggtaatttggaaagtttttgttattaatttgtaaagttattttgtaaagaatgttatatatttttggatttggtattttttattttagtaaggtgttatgtatatttggaaatatgtagaaaaaggttttagcgttttttataatagtaaatagtttatataaattaaatgtggtatatttatataatataatattagataagttaaatgagtggattatagtattgtagtaatatgtataaattttagtaagataatattgaatgggaaataggtttttagagatgatatatagagttgtaaagttaaaaaaatatatattttttaggaatatatatagatgtgataagagtattataattatttaataaaatttaggatagtgattgatatagtttgaggagggaggaggataggataaagagttatattcgtagaatgttttatatatatagaaatttttgataaaattttagttttatgttggatgataggtttatggttattattaaattatttaataaaaataaataaatatatatatataagagagatttgtatggattaatgataagaatgtgttatgaattaaatatgtgtttgtttttgttttatataaaataaagttatttttttgggttaagtttttgtgtatttagaaatttttattaaatattaaatatttaatttgaggattagttattaagttattattatttttttaatataaaagtgtatgtaagttagaatattttagtatagagtaagatattaagagtgagatattatataaagtttgatgaggaaaaagaatggaaaggttcggagtttgggaagatttcgtaagaaggtgaaggggtgaatttttgtgtgtaggaaggagaggaggggagtatcgagtgttagtgagatttttaaagttatgtaggatttttttgtttttgttttcgatttaaattttattttttttcggtgtatttagtattttagttatttatttatttattgaatgcgggagtttataatttaaataaatataattagaagattgtaggattttatttaaattattgagtaattattaggatttttaatttgatttataatatttaggaaagaaaatagatgaaagtaatatattttatatagaaaatattatttaagtttgttaataataattttttttttttttgtttttggaaagatggaggaagatatttatatgtttatttgtgaattttaatttaaataattagttttaaaattaagaaaaaaattgtattgggataaattttttttttttttttataaattaaagagaaattttttttataaaattaatatttttatatttttttgtgagtatttttgttttttttttttatgtattattttaataagtaggaaatagtttattttttaataagtattttagttatatatagattttgttttttttatattaaataaaaaatttaaagaattatatataattttaaaaagaataaagattaattatataaaataaaataaataaattaaaaatattttattaaaatttgttgttttgaaatagttttaaattatatttattttaaagaagtaaaaatgttagtataagttaatatatagtttgtgtttgggttagtttataatagtgatgattttgtaaagtttttgagaatttggtttttttttgtagtaagattgtgtgttaagtataatgttttttttagatttgtaggaattttaataaaaggatgaaatttttttatttgttgtattttatttttttgttatagttaaagtaatatttattttttttttttttgttttttgtaggtttgtagtaaattaaaaaagtaaatttttaggtttattgtgtaaggggtttatttttaggtttttatagttgttatagtaattaattagaaatttgtatttttaagagaattatttaatgttgatgtgtaagtttttttattttttggagtttggttttttgttaggaagtttttggtaggtgttgggtttcgaggttatattgtataagttttgaacgtaggtggttttggtttgttttttttatttggatgatttatgtttagtggagaaaatgttttgttaggtttttgttgaatggtgggtatttgaaaggtagtatttgatttatttaggcgttatttgttttaatttgtaattttttttttattgatttaggcgttatttgttttaatttgtaattttttttttattgtttattagttaatttttatgtaattgagttatgtatgttaaaacggtagagttgagttatgttaattaatttattgagaggaattttttattaatatggttgtgaggtttaagaagttgatgttgttaaaatgtaaaatgttttgtagatttggatattgtgtaatagtaatatgaagatgaatattttttttgaagagttgtttgttttttgaggtttaaatttatgtttttttagtgtataaagaagatagagataaaagggaagggattgaagattttcgggtaatttgttttgaaatagagaagatattgattgttattttgtgttgttagtatagtttgggagattagattagggttaaaaggagataaaatggatacgtgaatttagttattattaatttttgaaatattattttttttaaagtggaggagtttttaagtttattatagttagaagataaaataaatatatatttaagaggatgattaaatttgaagttaagaatagatttaatatatttatgtttattgaagtattagttataatagtttaaggatggatgtaatttaagtgtttattgttggatggataggtaaataaaatgtggtatagatatataatggaatattttttaatattaaaaaggaaggaaattttgatatgttataatatagatgaattttgaggatattatgttgagtgaaataaattagttatatatagattaatattttatgattttatttatatgaggtatttaaagtagtttaattgatagaaattaaaagtagtagatttatagaaataaaaagtagtatggtgattgttataggttgggaggaggaggggatgagaagttgtttaatgggtatagagttttagttttataagataaaatatattggagattggttgtataataatgtaaatgtattgaatatgattaaattatatacgtaaaatagttaagatagtaaattttgttatgtatattttaatataatttaaaaaaatggtagatttagaggaaaggtaggtatagtttttttttgaagaaaataaaagaaaggtatttacgtatataatttttaaagagaaatagattaggtttgttaaatgtgaaaggaagtagaataggtttggtaaaatgttagttttttttgttgttaggtgagaaggatattttgttggtggaagtattaaattcgggttttttgttgttattgttttgttatattatttgtatatttgtaaaaatgaatatttaaaatataattttatatatgttttggaggtaggagatttaattttttagttaattattgtttttgaaaaagttttggttagataaaatatttgtgtttttttttttttttttttttttttttttttttttttggtaaagatttttttatttttattggggagggaggaggatgaatagaattgttttttaatttatttttgtattgtatatatatatatttatatatatatataaatatatatatattaaaaatattttaaataaaaaataaaaatattaggaattaaaatttaaagtatttttaaattgtattaatattttttattttgattaaaaaaaattttgggaggtagtataaaatgtaaaattagatgattgaaaaattttgaataaatagtattattaatatataaaatagttttattattgaattagtaataggtgatgtttttcgtgtttgtaaaattttggaattacgtagttgatttgttaaatttagtttatgttagtttttaaaaattaaaattttatttagttttattttttgatgttttattagatttttttataggatttagaatattttttttttttttattaatgttttttggttttggtgttttattgtttaagatttgttatgggaattgtttagttaattttttaaggattgttaagttgttagtattaagttgatttaatattttaggaagtatttttgtgattggtttggtttttgtatgattagtaattgtaaaggtattagtagaaagggaagtttggattttgggattgttgaaatgaataattgttttattatttttaattatgtttatttttttaatattagttatattatttatagttaggttttttttagataattttgaagttttttgttattagttatagttgttttacgtattattttttttttgtgaggtgtatttttgtttttttttcggatttgagtttgaagtttggttaattttttttgatttatgttgttggtaaatttgaagtacggagggttttttaatattagtatatggtaagagtaagatggttgttttatttttttttttaaattgtgaataaagtatataattatttgagtgatttttcgtaatattaatttttttatttgtataaggtgtttgataagtttagattaagtttttagttttaatttaaagaaaaatagtgggttttttttgaatttagagattattatatttttttaatatgagtggttttgaattattttttttagttttagaaattaatataatgttgagtatattggtattttgttttaaaatttaataaattttatttaaatttaattaggattatatttatttttaattaaatttttgttatgattttatatttttaaaaattttttgtagaatattattgattttgttatttaatttttgtatttatttttagtttatttaaaagtttgatataataattaattaggttttttagtatattttttgaaagtaggtaatgattttatgaaatataaggattaaaatattttaaattgaaatatttttaaaggttgtttttaagatgttgatttttatattatgtttggtagaaatgttttaaagttataggtgattgttaggttttaagagtttatttaattatgagttaataaatggaaggttagatttgtttttttagatttaattaaagttattttattaatatttatatgttgagagttttttaggtaggagaaggaagtaaataggaatgttggataaaatttagatattagaattaggaataaaaattataaaattcgttattataaataaagttaataaaaaggtaataaaatgttttttagggataagttatttattcgtttatttattttttatttttatttattgagggtgttatgagttatgatatttattattttatttagatatttttttttgttatgaatgtggaataatttttttttgagattatttttttttttagattgtttgttatgttttgttttatatttttgttttgtgttatgttttgttttttacgtattatttataggatacgatataaaaatttgtaaagaagaagatgtttaatatatatttattgggttaagtttgtgtaggattgaaatttttgattgtttgttgtattaataagattatattattattgttagattgaaaatatatttgtgattatttttattaataattatagttgtttttcggtgtttatgggaaattggttttaggattttttatggatattaaaatttatagatgtttaagtttttgatagaaaatggtgtggtatttacgtaaaatttatatatatttttttatgttttataagttatttttagataatttataatatttaatataatgtaaatgttatgtaaatatttgtttttaaaaattatattattttttttttttatttttatttttttaaatgtttttatttaaggttggttgaatttgggtatatgaaatcgatttatagagagggttaatagtatttaaaaattttgttttcggaaaataaagttatgtaaaaattgtttataaatttaatatttaggaaggttggttaaattatttggattttaaagtaataattatttaggaagtggatttatttaaaaaaataaaagagagagagagagaggaaggttttagtttagggtgtgtttatgagtaaagtaaagtaaagtaaaataaagagaagttaagttaagtttggatttgtgaaaattaaaggatgcgtagttttttatattgttatagtaaatttttggttttaaagagaattatcggttttgttagtaattgtgagaaaatagatatttttataagttattgttgggagaataaatggtataaattttaagttaggtaatttggttttatgtattaaaattataagtgtatatattttttaaatagtatgtttgtttttgagaatttattttatagatatatttatttatgtgtagaacgatatgtataaagttttttattgtttcgttgttttgaagagtaaatgttggaaatagtttaaatgtttagtagtgggggtttagttaatatgtacgtatgttagaatattatgtagttgttaaaaagaagtgaggacggtattaaatattgagttttaagttttatagttacgtaagtaaataaataaaattattaagtgtagaatagtatgtattgtatgttattatttatataaaaagaaagatagataagatttgttagaatttgtttgattatgtataaaatatttttgaaagaaaatataagaaattgggtgcgttgattatttttggagaggggaggttgagtggttggtagataaatgaaggagagagatatttattttattaatttaaaaagtaatgtattgaagtggaatttatataatgtagaattaattattttaaagtgaataatttaggggtatttagtatgtttatagtgtgtgtaattattttttttatttagttttaaaatatttttattttattaaaataaatttttttatttattaattggtttttatttatttgttttttttttagtttttggttattatttatttttattttgtttgtatggatttatttgttttggataattaatattaaaaaattttataatatgtgattatttgtatttggttttttttatttagtatgttttcgagattatttatttaattttttttgtatttttgaaaagtgaattatgttagagtattttataggtaaaaattaaaaaattaaaagtaaaatttttattgttgaatattataggagttaaaataaaggaaatttttagtttattttagaagtggatattttaaataggatttatgaaggatgagaaaaatattttttttttaagtaatatgttttaatttttttttagtttgagttttttttattattataataatatatattgcgggagaaggggtagatttggagaatttagttttgttttgagtgatttttgttattaatttgtagatatttgttatgagtaatgtatttttgttattttattgtgaattttagtagtttgtgaaattgtttataagttaaaggtttttattttttttggtattaaagttattttttggttttattattttgtatgtaatatagtagattagaaaaatagtattattatatagattttatttagtaaattatggagggtttagagaaaggaatttttgttatagataaggacgtgtggaagtttagaataattttgaaaaaaattgtaattgaatagtttttattttaagttttgttatttaagtgggtattgtagaataattttttaattgtaattttaggttttttaaatatttagaatattggagtgggaaagttaattaggttgatttgttatttatataggaatgtgttttaataaggatagttgattattgtataaatggttatatgttttttgtgataaggagtttataatttataagttattgtattagtttgatagaattttagtttggagtaattaatttatgttattttgtttggaatttttttggttttagtattggaagttttatattttgggaaaatttttagtatggagtaaattaggaaggttggtttttttgttttagttaagagtgacgatggttgggaaggtattgtggaggagttaggtagtaaaggatggattggatttttaaagttaaggagtgattagtagaaggatattaaagtttgtatttttttagtttatatagtatgatttttgattagtgtttaatttttatgtatttatgtttatttttattatatttttggatttttagtttggacgatagttgttaggtaatagcgagttattgatatttgttaatagggttgtaataagattaaagatgttttgtaggaatatttattttgtaatgtgtataattattatgggaatgtttagggttaataaaattagtgaggaggttgtggattgtagtagtttagttatgagagatttgaagtggggttgttggttgggataaggtagatgaagatatgtaggagaaaaacgagtaggaaatggttgttgttggattgaggataggaaagagagggagaaattttaattatttaaggtagtgttttttaagattaaatgtagataagaattatttgggaaagattttgtttttaatgttgatatttgggttttttttttaagttcgtgattttatttatttgtagggatttagataagggtaatttaaaaatgttttttaggtgattttattatggaggaagagtgtttgttgttgttgttgttgttgttttatttttttttattttttttttagatggagttttgttttgttatcgaggttggagtgtaatggtgtaatttcggtttattataattttcgttttttaggtttaagagatttttttgttttagtttttcgagtagcggggattataggtatgcgttattatgttttgttaattttgtatttttagtagagatggggtttttttatgttgattaggttggtttcgaattttcgattttaggtgatttatttattttcgttttttaaagagttgggattataggcgtgagttatggagttcggtttaagagtggttatttgaagtgtttagtgtttgagatttttttattttttttttaaaattatttagttattgaatatttgaaatgaattaattagtttatatgcgttattatatagaatttttttttttaattattttataaggtgtgattttatttttattttataggtgatggaattgaggtttaaagaggtttattgagtgaggttaagagtttgaattattaatgtttgtttgttttgagagtttacggtagtttataaaggaaggtaaagtttattttttgattttttttaatattagaataaggggtaggattgagttttttatttattaggagatatttgataaattttttatagttaagtttttataaagaagttttagattatatagtagaaaatattaatgattttttattgaggtgggtaaaaaagattttttttagatgattgatttagtatatgtgagattagtaatataagagagataataaatattatagattttaaaagaatgttataatgaaaatttgaatttttttataggttatattttggagaacgaattttttttttatatatgtaatggtgattaaatatttatatttttatttttgaaatgataataaagttattagagttttattgtttttgttgaaatgtagttttgtatttaaaggtattttaaaatattagacgaggttaaggcgggtttgatttgaggttaggagttcgagattagtttggttaatatggtgaaatttcgtttttattaaaaaaatataaaaattattcgggtatggtggtgggtgattgtaattttagttatttaggagtttgaggtaagagaattgtttgaattcgggagggagaggttgtagtgagttaagattgtgttattgtattttagtttgggtaatagagtaagattttgttttaaataaaataaaataaaatatgtgaatataattagaaaaatatatattattgttaagtaatttttatgagttaagaatttaagaagttttaagttttaaatttttttttgttgttttttgtaaaatatagagaaaatttttgaaagtaatttttttatttagattatagtattttattttatttttaatattttttgttaaggtatatggttttttaatattttaggttttaagattttattaattagtattgatgtttttggtaagaattagtgtaaaattttgaaatttgttttatttttttggtagttatattagataattatttgtatattttttttttaaagtaaagaatttttatttggtttttttaatttttttttttttttttttatgatgattttttttttgaaaattttaggaattttaattaatttatggaggtattgtaatattaatatagggtaaatataaaaaataaataattattttaagaagataaaagtaaattttagtgtcgtttattttgtgtgtatagaagaaattattttgtttttttttataaataaggggtttgtaatgtgtcgttttttttttgtagggaaggggggtatttattgatgttgtatttgttttgttagagcgttagttaatggagaaagttaattgtgttggttgtaaggttatttgttatatatatgttttatttttatattaatggtttagtagtggtaggtagtgtgttttttgtagtaatagttattgtttttttggaaacgtgggttaaatgtgtttatgtagtaattgtaggttttatatgtgaatgtttttagtattgtgtcgattggggtttatattaattttttattggtagttttaaattagatttgtagtaaatgtggggatgttgtaaatgttgttttggggtaagtattaagtttatggtgaatttgttgggaaaggtagtttttgggttttagagttttttttgaataattttttatatagttaatttattttatattaggagagagagagagagatggttgaaacgtttgatatttttttttttaagaatattttttgtatattattttattgtagtagttagtgttattttttataagtatttttattattttttttgttttttggaattattatgtatttttaggagaatttgtaggtattatttttatttatgagatagaggtttgttttagagttttgaataatatttttagttttgttttttaaatgattaaaagtaattttaatttttgattataaaggattttaatttttgtattttttttttttagatagagttttattttgttatttaggttggagtgtagtggtgagatttcggtttattgtaatttttattttttaagtttaagtgatttttttgttttagttttttaagtagttgggattataggtatgcgttattatgtttggttaattttttgtatttttagtagagacgaagttttattatgttggttaggttggttttgaatttttgattttaagtgatttatttattttggttttttaaagtgttaggattataggtatgagttattttgtttggttaaatttttgtatttttagtagagacggggttttattatgtttgttaggttggtttcgaattgttgatttcgtgatttatttgtttcgggtttttaaagtgttgagattataggtatgagttattatgtttggttttggttttattttttttagttatttttgtttattaattttttaattaattaattatatttaagaggtataagtatagattttttatgttatatatggtatagtggtgaagtttgggtttttagtgtatttattatttaaatagtgaatattttatttaataatttttattgatttgaaaagttttttttttatttttttttattagggttgttgcgagttattaatttttgttaaagttatttaaattttaattagtttattttgtattttttttaaatcgtttataatttaggggaaagttagaaaggaataaaatagtaatatattttttatttatatattattatatttttaaattgtttatatataagggagagggagttaagtaggggagaaaagggaaagggaatttatgtatttatgtagattttttggtatatggtggttattagggaattgtggattagatgtgattttttttttagttttagtgagattttttgaggtgagttggtttatgtttattttttttgtaataattatgagaatttttaaggttataagttttggtaatttgtgagtattgagaaaagtagttttgatttaggggaatagttaataataaatggtttttatttatttataaaaaggatagttagaattagaatttagggtagtaaatatttagttttaatggtcgtagtgtggttgtgtgggatgttgtttgttttttatatattttgggtttgtttttttaagttattttataggattgtaaattttatggcgttagtgattaattatattttttttttttttatttatgattttatttttagtgtttagtttagtattagatatatggtaggagtttagttagatgaaggaatgtttgtttgaatatatgtgatttgttttttgataattttttttgtttgatttaaattttttaatgttattttttaatttttagatttagaatttttcgtgttttggggttggttcgatgttttagattttaatattagtttttttttagttcgttataatatgaatttttattttatttttttttatatgtgatgtttttgttagtttttgtaaattatagtttaattattgttatattttgttttatgaggtgttttgttttatttttttttttttttttttttgtcgtgcgtgtgtgtgcgcgcgcgtacgtgtgttggggatgtttggagatagtgagtcggataggatatgaggaaagagaaaggtttttggagagaagattggagaatttaggttagattagattttgtatagtattttttgttaaattttgttgtttttttttttttttgtatttatttttaaaatttgattttttttttttattttttttttattgttttttttattatttttgagtaggttttttagaaattataaagtattttagaattggaaagttgtttttattattttttttttgttattttagaaaatttttgtatattgttatagaagatattatgattatttttggggatatttttttatttttttttttttaaaaaaaatagttttggagaatttttagtaggttgaaattaggaagtataaaaatatgtgtaaaataattgtttttatggtagtgagatatatttagggtatttgagatagggaataggttttttagatattgtagaagattaaggaatttggagggagaaggatagataaggtatttattattggatttaggatattgtattaaaaaatagaaataaataaattaaatatatatatatatatatatatatatatatatatatatttttattttttgagatagagttttttattttttcgtttaggttggagtgtggtagggtgattttggtttattgtaatttttattttttgggtttaagggattttcgtgttttagttttttgagtagtagggattataggtgttcgttattatgtttggttattttttgtatttttagtagagatggggttttattatgttggttaggttggtttcgaatttttgattttaggtgatttttggttttttaaagtgttgggattataggtgtgaattattgcgtttggttttaaaatatttttattagtgatattttttaaaggtaagtagtgaaaatgatttttttaggaattattaaatttaagtatttaggattaaatattttttattgtattgttgttgtattttagtttttttataagaattagatttttttttaggagattattaattttgttttagtataattattttatttttgttttttattataggtgttggagatgagatttttaattgtatttttttttatatttttttagtgtttttttttagattattttgttttatttttagttatttttatgtttttgtttattttttatatttttttttagattcgattatatttttgttttaggaagttattttaatgattattgataagttattataattattattagaataatgtttatttattatgaattttaaggtaatggaatttttattttttaaaatataattggttgtttagagagatggttagtgttaatttaaattgtattattttgtaagtttttagtaatttgaagattttggtaaaagtgaaatattttacgggggttcgggttgtgagaaatattttgtttaattatttgaatataaggtggataaagggttaattaaagaaatatttttgttatatttagttgggagaaagtgtaaggaatattatattttgtaggaataagggttagaatttttttattatgggaatattttattaatattttgtcggttagtaagttatattatttagatttttttcgtttatatttataagtattttcgtttgtaagtagtagtgggtattggtattaggttggttttttatttttgtaggttttatgttggatataaagtttatatttgttgtatagtcgttattttttttgtgttttttttttaattttcgttttttttttaaaatttaatagttacgatatggggaaatgaaagtttaagaaatatgatttttagtttttttaatttagatatttaaatagttggagttagttttttttagatatagtaagaagttagtagagataagttgatatatataggtagtttattaataggttttagagtttgtattaaaaagaaatttaaattggtatattagtatagttatttggagagtgtattttttattaattttattttagaagtgaggttttgagaggtagagtaggggagaggaagtgatattagttatgagattattagggagatttaatttaattatattaattatagaaaaaaggaaaaaggatatttagtatttattgtaatattttagtttaaggtgaaggtttttataggatttttgttaatttaagggatattagggaaaggtaaaattttgttattaggtattaatattattgatggtagggaaaggtgaaatatttttcgttagtaagagtagaagatattttttttttaagggattgtttttttattaaaatttttatttttgattaattaatatgttttagaggtagatattagaataggaggtaagaatttagttttttttttttatagtttttagtttattggagagtgatagagtagtgattgttgttttgattagttttagagtttgtgagtaaagagttaataaaattttttgtttttttttgttttgttttgttttgttttttgagataaggttttattttgttatttaggttggaatgtagtggtgtaattttagtttattatagtttcgattttttgggtttaagtgatttttttattttagttttttgagtagttaggattatagttgtatgttattatttttggttaattaaaaaaatttttgtagagatggggttttgttttgttgttgtttaggttgattttgaatttttggttttaagtgatttttttgttttagttttttaaagtgtagaaattataggtgtgagtttatgtttggttaaaatttttagtttttaatgagaatttggtttttagttgattttttagttttgatcgtttggtgatttgataaatatcgaaagtttgttatgttttttttgttgttgttttttttttagacggagttttattttgtcgtttaggttggaatgtagtggtatgatttcggtttattgtaatttttgttttttgggtttaagcgatttttttgttttagttttttgagtagttgggattgtaggcgtacgatattatatttagttaatttttgtatttttttaagtagagatggggttttattatattggttaggttggttttaaatttttgattttgtgattttttggttttagttttttaaagtgttgggattattgtatttagtcgaaagtttgttatgttatttagtaatattgtttatataagaatgatttttgatgttagattgtatttgaattgggagaattgtaaatatgtattaagaagttataattttgggtttttttgagtgtagtgatttatgtatttggttatattttttacgggatttttgtaggtaatgtgtatggggtttttataggagattttagtttttggtggatttgtggggtttttaagttaggttagtttttaatttaattgatagaaggttaaatagaataggttttaggtggttatgtggatatttgtatagattatggcgagtattatttttatagtagagggatagttgttaatgtttttgttggtaaattgtgtttttttttttaggttttattgagtagattgtttttagatgagagttatggtaattttttaagtttgcgtggttagttgaatttaaaaagattatatttttatttagtgggtattgtagttaataattttttattttagtgttatttagaatgagaaatatttatattttgattaataattttcgaatttttaattttgaatttttttttttttgtgtaaaatatttggaagatggttttttagatttggatatttttggttatgagtagtaaattagttatatatttagatattatgttaatttaatagttgttttgtttgtatttataaatatgtatttttgattttgaagtagaagttttatgatatttgtttttttgatataagttattaaatttttggataggtgattattttaaaattttgtttttttagtttttttatattttttttttttttttttagttttaatttgtgattttttgtatttttatttttatttttttttttaatatatttattttttttttttatttttttatgtgttaatttatttattttttttgtttttaattttttttttatttttgttttttttaaatttttttttatttatttttttttaaattgtatttttattttgtatttgttattatttgttatttatttttttatttttttttttttaggtttttattattttttaattttaatattagaattttattttatttattgttaataatttgttataatatttaaaaatgatagtggaaagaatgaagagttagtaaaattttagttttaattttattaattaatttatttttttatttttttgagaaatgatttttgatttttagtttttttatttttaaatatggggataataattgttttatttattgttatttgaatgttgtttagatgtaataaagtaatgtacgcgagggttaaaaaaatagtagtaagatattatagggattatttaaagaatgtgattaggttgttaaaagttgttgaaaatagagtttaatttttttggagagaattttttagggtaattagaaaggaaaggaaggttaggcgtagtggtttacgtttgtaattttaatattttgggaggttgaggcgggcggattacgaggttaggagatcgagattattttggttaatagagtgaaattttatttttattaaaaatataaaaaaattagtcgggtatggtggtgggtgtttgtagttttagttattcggtaggttaagataggagaacggtttgaatttacgaggtggagtttgtagtgagtggagattatgttattgtattttagttcggatgatagagcgagattttattttaaaaaaaataaagaaaggaaatttaaaatttgtattattttataaagtgaagataatttaataatggaaaaattatttgtatggaaagtatagtaggaagtttaggtgttgggttttaagtttttattaagtattggttttatagagttagattatatgttgaagtggaaatagtttaggattatttttagtaggatattttttattttgtattttagttttatagttaatatatttttattgtagaatttggatgagtttaatttggagtattgggtgagattatgaggtggtagaaggatttgatttttgagtttttgggtatgaataattgaaataaaaatagattgatgttttaagtaaagtattaaaaggtattataattgagaattagatgatttattaatggttttttgagagagttttaaaaaaaaaagagaaaagaaattagtagttatatatatattttatatatattttttatttatatattttaatttgtatattttttttagtaggaatttgtattattattgttaagtttagttgtagttgagtagtagaaatggtgatttttttgttatggtaaattagtatatataagggtttttttatttaaaaattttttgtgtgatgttgagaagttattggaaatttgtaagggtttattttttattttgtagtttgtttttattggtgaggtgtatatttatatagttaattatgatttattgaaatgttaggttgaagaaaaataagggttgaagaaaatgtgaattttaaatttttgaaattttaatatggaaattaggtagcgatttttaagatattgtaggaaagtaaaatgtttattgtggagaattagagagtaaatttattgaaaggttttgtagtttcggttgtgagagagaaagagggagaaagaaaaagatattagtatgttttattattgtgaaggaaatttttattttttaatattcgttttagggagtattataaatagaaataacgggaagattaagagttgtttgtatggcgagttttaggtaggttttttgtataatataagggatttataggaatggaggtttttttttgtttttagtgatggttgaaaatttttagagggttgggaaagatttattttatattaatttgttatgtttttatttttttttttatatttttttgttttttgtttttagtttttttagagatatggtttatttgaaaggtgtatttttttttgttgatggattattatgattatttttaagagggttgttttggtttatatttttaaatgttagtttgtgagattttttaatatttcgtgtatggtttttttggaaattatgtaataggaatgttaggggagttgagaaagatagtgttaaaaaagtaagttatttttaaattttagtattatataatatatttattagtaaatttgtatatgtattatcggaatttaaaataaaagttgaaattatttttaaaaatgtagggtagattaggttttaagattttgtaggttagatattaaagggattagagtggaaaaataaatttgatatttacgaataggggttgtgaattgtattgaaatataaaaaggaggaaagtgtggtttgatattaatagaatttttattttattagtattgtttttaaagaaattatgaagtaatttaattagaggagaataattattgtgggattgtagatgattttagtttggaagttgtataatttttttattagattaaattatttagtatttattttaaatgagaaatttaagtaattaaaaataataaatataaataattaaaataaattatagttttaaatatgaattatttggtttttttttgttttaaatttagtagtaatttaggatattgtgtttgattgtttgggtattagaaggtgttagaagatttgaatataattaagaagtatgagtgagaaattttgtaggggtagaaatggtaatagttaggatgtggagaggattttatattttatagaaggttaaagaatattagaggaaatagaaaaggaatttatttataggtttaatagttttagttaaaatatggaaaaaataaaatagaattaatgagaaaatattgtttgtatttaaattttttttgggaaaatattataaatgtagatattaggagtaaaatttttattttagtggaggaataaattaagtttataaatgtttttttttttattttggaggatttcggttattggtggaatttgttagttggaattgtggagacgtatatttggttaggtagcgtttttttttttttttttacgggtgttttgtttgtattttaggagattatataggttattgtttgttttttagttggttaatttgaatttgtttagttagaatttatagttttatttgaaggagatagtgggaattgttgtttttgtagtgattttggtttttatttaatagagtaatttggtttgttatgtaaaagggaatagaaattgttaggttgatttaagatatttataggtatgagtgttgggtaaaggaattgagatattagatttatatatttgttaataatgtagtaatagtttttttttttatgattatatatatatatatatatatatatatatatattttattatatttttttatattttataggttataagtgatttttttattttggttttttaaagtgttggggttatatgtatgagttattgtgtttggtttaatatgtgtttttatgatatttatttagtatttgtttttaaagtttgatttgattattttaataatgttttatttgtgtaaataatttaagaggagtagatataggatgtgatatattatgagttttaattattaaattatttttttttttttttttttagagttagttttgttttaggggtttaagttttgaatatttttaaaaatgaaggatagaaatgtgttaagaagtgaatgaaattttgatgagttttattttttttgtttttggttttaaggttatttttggtgtggggaatttgtagggttggaaaagttggttaaatttggattaagtgtatttatttttttatttttttttttagggtagagaattaaaattttgtagagtaatggtttttaaattttggtatgtacgtaaattatttgggaattttattaaaatgtagagtttgatttagtaggtcggggtgggtaataggttgagattttgtatatttaaaattttagggtgacgttgatgtaggtttttggatttattttaagtattaaggttataaagggttggtaaaattttagattatataaaagttattgtttttatttattatttttttttttttttaaattaatttttttttatttattttttattttttatttttaattagtgttttttttagagatatatgttatagttttatttaaaattttatttggatatttattttagatttattttttgtttataataggggatatatattttatataaatattagtgatagtttgggattttcggttagtgagttgggatttattgtatgttattgaaatttttttggtgggttttaagtagaatggttattattaagtttttttttttgagtgttattgggtttttttataggggaattttttttttttttatttgattattttttgttttttatttttttttttttgttgttgaattttaagatttcggaaaagttaaaggtaatagtatttttttatagaggtattttagtttattaagataagaatagggaataaataaggggaaaggaatggataatttgtgaaagaaataaaaaaatttaggaatatgagtgttttatatattttaatagtttagtaaagtaaagtatatgagaattaaagggtagaaaaagaatttatttatggtttttgtagttttggttaaaatataaataaaaaaggtgagtttgaagagagtatgatttaagggtgtttattttagggagttttagattaagtatttattatatatttgatttatatggaaaggtagtaagaaggtaagtaggtattttttttttttttttaggagattgttaaaattatattttttgtagttattttttttatttttaatttttattatttttttgttgttaaatttttttaaaggttatagataattttttttggttttagaattttttttataattttattaattaatttagtttttattataagaatttttattttgttaaatgaaaaaattaattagttatttagaggattttgaaattagttttaaattttttatattggtaaaagagagaatagtaaaattgtaagtttttttttttttttttatttttatgtgtttttttattattttttttatttttttggtagtaggtatattatagaatattaaaattattatatatggtatgtatgtattaaaatattatatgtattttataaatttgtataattattaggtgttagtaaaaaaaggattgagttgtatatatgggaaatttataaggaggttttttagttgtttgtaaatattttatattatttataataaaaattgaaaagtgtaatattatttagatttagatttttagaaggtatggagatagataattttatttttttttttttttttttaggtgtggtataaatagttttgagattaaagagttgagttcgatttttgttattttttagttttgtgattttgggtaagttattaaatgttttgaatattaatttttttatttttaaaatagaagttgtgttttttgttttatttatattgtgaagttgtagtgaaaaattaggagtaataatagaagggaaagatgaaaagttgtattagaaatgttatggaaagaaatatttagtaattataaatgaatgaaatatttcggtaaagtagtaagttattttatattttatttttttttgttttaatttttttttttatttttgattgttttttggaaagttttgagttttgatagtagagtattataatgtgtatttaattttgtttttatttttgatttattaatttttgttattttaatttttaaaataattttatttttttgtgtattttagtattttaattatgttattttaatttttgttgtttttgttttgagaaataattaattatattttaagatgttgaaaattttgtaatttttttttttaaaataattgaataatttgtttttttttttgtgtataattatttttcgtttatttgttattttgttgttttggggagggaaatagtagttttttttagaaatgataggatttatttttagtatttgggaagagatgtttgtttttttatgtggtattttaggtcgttaattattgaattgttagttttttgagaaggtgaagttatttttattattaaataaagataattttaaaaggatagtttttatatatttaattttttaagatttaagatattaatttatgttaggagtgataagtatatttgagttatgtatatttaattttgattaattattaatgattatttggagatgataagaattttaggatatatgtgagttgagtaggaaagagaattatgattaattattgatttttgttataggtaaaggtatgagtagaaatgtaatataggttatatatattttatttttgatttaaagtaatatggaataatgaggagaaaggaatttttttttttttttttttttgagataatttttttttgttatttagattggagtgtagtggtatagtttcggtttattgtaatttttattttttgggttgaagttatttttgtgttttagttttttgagtagttgggattataggtatgtgttattacgtttagttaatttttgtatttttagtagagatggggtttcgttatgttggttaggttggttttaaatttttggttttgagtgatttttttatttcggttttttaaagtgttgggattataggtgtgagtttttatattgggttaagaaaggaaatttttgaattgagtattttgtggcgttttttagttgaagataaataagtagggtagtggaaggtatttatttgttgttttatagagtaaagaagaagataaaaaaaatttacgatgtatatattttgttaaaatattgaatattgtgtgttttggattaaggatattgtttttgtggatattttttttaatgggagtattagagttagtttttttagagagtattatattttttatattagatagaatttttgattatttttgtggggatcgattataaatttagttgtattaaggggtttagtaggttttatgattgtgaatttgttagttataagggatagagatggtgaaaagtttatgttttatttagaggtatttaaatttaaaatttaaaataatattattttgattaaataaaatatatttataggtggtatcgggttagtggtggttaatttgggagttttgtttttagatgagaagagatttaagtgagtattatttatattttaataatagtgtattttgaaattagtattatatggttgtggtttgagttgggatagggtaagtgaattttttttttttcgttattttaaggataggtattggttggattatatttaattaaaatttgtgagtaataaatttgtttagattgtgaagtatttggaagttttgatattttttagaaaaaataatgaaatatgatatatttaattttatttttgaataagaaataattttgttagtaggaaatgtgattttaatatgtaattataaatgtaatagttagtatgaaaatttttgtaggaaaagtatatagattagaaaaaaaattttgtttagttaggattatttgttttggattttttgtcgatttttttattttttttttttttatttttgttatagttttttttttatttagaaaatgtgttttttttttttttttttgataattaattgaaattagttttagaaggtttatttaaattttatttttttggttttttttttttttttatttattttttttagttttttttatttttttgttttttttttttttttgagatggagttttattttgttatttaggttggatggtagtgttgcgattttggtttattgtaatttttttttttaggtttaagtaatttttttgttttagtttttcgagtagttggaattataggagtatattattacgtttagttaattttgtattttgggtagagacggggttttagtaggttggtttcgaatttttgattttaggtgatttatttgttttagttttttaaaatgttatgattacgggcgtgagttatggtgtttagttttttttttgtttttttatttgattaatttttaattggttgttgaaattagttatgtaacggatttgaaattttaatgagagattaaataatttgtttatgtttaaataaatagtaagtagggagttgggatataattttagttagtttggttttagagtttgtatgtttaattgttaggtaatagttttttgtaaattgaaaataattaataagtaaatttattttaaaagtgattttttagtaggttttattatattatttttaatttatggagaaatagtgtatagtttagatacgaagtgagtaataatttttttttaagtttatagttagagtgtatagtataatttttttttttgaaggtaggttgtgattagagagggatatagttaagggaggatttgtttaagatggaagaaaattaaatttgttttatattttaaggagaagtagttaaaggaaggaaaatatttaaagatgtagaagagagaagaaatgatttttgaagaaataagggggtgagaggatgtggttaaaggtaagaataaaataatttgtttaagtaaggtgggaggtttttttgttttagagagggggaaatgtgagaaaggtgggtatgatttagttaagacggttaatgaaggataaggtggagaattatgagttttaagtttttttattttgatatagtaggaaataggaaatagttaagatagggagaagttttttgtttagtataggagtttaataatattagagtttgaaataagaagataaatttatttatggatttttgaggtaaagttaaagaataataataattatttaagttagtttaaagttttaataatttattaattttttaaaagtttttttagaaatagtgtttttttttaggttattagattttttatttttttgtaggtaggtttataaagtggttatatttgtaagtgattttatgtttttttttttttagatattatgtaggagtgaaagttttaggggaatatttagttttattatatttttaatattttgattttatttattattttttttttgtttttttcgttttttttttttttttttttttatttttttagtttggagagttttttttttttaatgtgatagttttaagaattaaagaaaggtaatgttataaaggttttagttttataagaaaagaaaatcgagattgagaaagggaagggttgtgtttgaatatgtaaaaaattaaaggtagttttagtttttagtttgtttgattttaagtttagtacgtttttttttatattttttataatttttttttttttttgaatattttttaaatatttttttttttaacgtattgattattttttttttttaatattttgtttttgttttttttgtttagttttaaaatgttttttttgtaaaataatttaaattttagggtaagatttgtagaaggtttaatgatattaattttgatagtaatttgtataagttattatagaatgaatttttattatatttagtggagaaagtttgggtattagttttatttgttttatattgattgttaaatgattatgtaaagtttgataatttttattattttttggaattgtatttatttaatttaatttatttatttattttattttattattattgtattttaagttttagggtatatgtgtataatgtgtaggttagttatatatgtatatatgtgttatgttggtgtgttgtatttattaattcgttatttagtattaggtatattttttaatgttattttttttttttttttttattttttattttataatagtcgattaatgatagggtttaataattttttttttgtttaatttttatgatttaatgaggttaaatttataaattaaagttttgtgtttttgggttttttagttttagggtaagttttggtaggagaagtaaaaaggttgattttttagaaatagggtttgtttagaaagaggtaaataaggaggataaggtttttagataaataagcgtttatggtattgaaataattaagaatttgtttaatttttttgtaaattgtgttagatatttatatttttaagtgtatgttaattgtttaaaagtattagcgttaatttttttttgaaaagaagattagaaaaaaaattttttatattatttttattagggagtattaaattttttatgttagttgtagtgtgatttttttatggattgtttaggtattttatattttggtggtgtggtcgaggtttagaatgatatgtaggattgatgatgagtagagaaggtgatttttttttttttttttttttagtttttgtaaagattgaaattgttaagggaatttggaagattttaggttttttttggggggttggggtcggggggatagggttttattttgttgtttaggttgaagtttagtggttgtatagtttattataattttttattattgggtttaagtgatttttttaatttagttttttatgtagttaggattataggtatgttattatgttttattaatttttttaattgttttgtagagatagagttttattatgttgtttaggttggttttgagtttttggtttttaggatttttttatttcggttttttaaagtgttgggattataggtgtaagttattatgtttggtttttagttttttttttttttttttttttttttttatttgtttttaggaggtggaggattttagttttgattaaattttttttagtttttttatgtgttttttttttattatttgtttgtttttattttttttttttaaattgagaaatagaaaataaattgaaatatggtttttggaattggtattgaggaataataataaaaatttatattagtttgagttaattggtttataaagtatataatttttatcgaaattattttagaaaggggatttttgattaggttttattaagtataatgggttattaattattagaatgtttgggtttgaattttggtttttttatttattagttgtgttattttgtttgttttttttttttttatgtttaagtttatttattttaaaaataggatttataatatttattttttaggattattatgaagaaaaaatgtttaggatagagtttggagtataatgtttaatatatattattatattattattttagattgtagtttttatttgtttatatatgtatgggtaatggattatagttttttttattttgggtattacgttagtttaagatttttacggaaataataggattaagttttttgaggttttggtttgagaggttttttttcgagttattatagtttagtgaattgtttatgagaattattttttaagagggttttatttattttgtaggattatatattattttgagttttagggatgaatagttttttgtggttttatgtattttttagttaaatattttatataattaattatttattattttttgagattaattttaaaatgtgttatatttttatttaatttatttattatttaaagataattttttattttaaggatgtttattattataatgttttttataatttttaatcgggacgttttttttatttttttttattttttaaaatatattatgttgtttgaaatttatattagtaaatttttttgtatttttaatttttttaaacgttttttttatcgttttgttttaatatttttgtattttaagtttgggtgcggtgttttatgtttgtaattttagtaatttgggaagtcggggagggtaaattatttgaggttaggagtttaagattagtttgggtaagatggtaaaattttgtttttattaaaaatataaaaattagttgggtattgtggtatacgtttgtaattttagttgtttgggtggttgaggtataagaatcgtttgaattcgggaggtggagttgtagcgagtcgaggttgtattttgtattttagtttgggtaatggagtgagattttattttaattttttaaaaaaatattgtattttagatgttgtttaaagtatataaaattgtagttagatgggaggaatatttttaggagatttattgtataatatggtgatcgtagttaataatgtgttatatttgatatttgttaagagagtagattttaagtgtttttattataaaaagtatgtgaggaaatggatatgttaatagtttgatttagttattttataatgtatatatatattaatatattatgttgtatattataaatatgtataattttgttaattaaaaattataatatttttaaaaaattatgttttttatagtttttttagattttttttttttgagatagggttttattttgttatttaggttggagtgtagtggcgtaattataatttattgtagttttgattttttgggtttaagtgatttttttattttagttttttaagtagttgggattataggtgtatattattatgtcggttaattttttatttattgtagagatagggttttattttgttgttgaggttgtgatgtttggttttttgtatgtttgttttagaaaaaatttatatttatatatatgtttgaatgtaggtaaatgttatttttgttttttattgttgttttcgaatagttttttttagtagaaatttttgttgtttttgaagtatatatgagattttattttgtattttttttttttttgttattataaataaatatgatggttatttttttttattttattttttattagaagttagggttgtttttttaaagtataaatgtggttttattttttttttgatgaaaataatggtttattgtggtgtttagaattgttttttatattttattttaaaagattttttgtgatttggtttcgttttattttttaaatttttttacgattttttataattggtttttttgtaattttttatatatgttattttttttttttttttaggaatttggtgttttttttgtttgagatatttttttttaagatttttttgtggttgttattttttcgttatttagagttagtttagatatttttttagggaaattttttttaattttttagttaaaggtttttattttttggttttgttttattatattattttaatttgtttttttcgtagaatttattatgatagtttagtaattatagtaggaattatttagaaagggaaattattgtatttgtttgtttatgtgtttattttttgttttattttattagaatttatgttgtttgtgaaatatttatgttgttttaggtatagtagttgtagtgttttaaatgattttttttttggagggtttttatggtaagtttgttttatatgggttttttgtagattttgttgaagaaattgaagatttgagtttattgtttagtatgttttaatttttaaatattttattttttttataagttagatgaaaataaagtaaaattagataaaatatgttttaattataaaagtaataaaatattgagtttgatagttttttaagggtatttgtttatagttgtatatataataaaatagttttatttatgggataaggttatggtatagtattggattagtatattaattttgatattttatattaatttatattttaagatttttaaattatattttaaaaattgaagtaatatatttttaatatatgtatgattttttaaattttttggaataaatattttatttttaaagaatattttggattggaagagtaaatatatttaatgatgttttgggggtagttggataattttaggatttggagtttaaaggttagtgtttagaattttagttttatttttttgttagttatatgttttgggttaagttaaataatatttttaaattttattttttttttatgtgtaatatttgtaaatagttaagaaagatgatttgttttaattataaatttttttttgttttttatttttattttttggtttttttataagttttttttttttttttttttatttttaagttaatgaatttattattgttttgttgaaattatgattgttagttaaaattattttaattttttttttattttttaatcggtggattttttatttttcgaagtttttattaattttagataaaatgtttaatgatggggaaggaaaagtaggtgagggataaaattttagtagggttagggaatgttttttagttttgtgatatattaaagagatttagaatttggaaatatgaaatttttttttttgtttttttaaaagtaaatataaataaaaaatttatgtggttgtttggtttaaaaattatttattttttttttttttttttttttttgtaggggatagggtaggaatgagtattagaattaggaacgtttgggagtattaaatttttagtgttagttgtagtttagggggatagggaattagttattttttttattgttgttagtttgatttggggatgttttagggaaggttgttttttcgtgttagttatgtaaagttttaaaattttgaggatatagttaatattatttattttttattttatattatttttatttttattttttttattaattttttgtttttattttttatttattttgtttttttaatattttaggtttggaaattgttttttttatgttattataataaattattagaaatttgtatttatttttgattgattattgaagtgtttggttatggagaataaagaaattggagaaatgtgaagtttaagtttttgttgtgttgtagcgaagaagtttgggaagtttaggaagatatttttttgattaaatggggttaaatgttagtagaattgaagaaaagtaaaggaatttattaatatttgatcgagatagtgttaaaataaaatatattaaaagaagaatgagttttgtttgttttagggagaatttagatgttatagatattatattgtagaaaggttgtggaaaagaagatagaaatgagttataatttattttttggtattaattgtaatgtaatgtggtgagtagttggatatttatatatggattttaatatttttgtggtaaggtgggattataagatttatgtaatttgttttttaattttggtaagagaataaaaatatttttggagattgttagttttttaatttgaggatatttttttgtttttataagtttttttttattggcgattttgttgttttgttttttttttttttattttttttttatttttttttttttttttttaattttttttttgttttttttttgttcgaaaagattttttgttatattaaatagttattatttaattgttttaataggggtttttattttttaaaatttatttgtgttttatggagatgaagaatagtaagagattaaattaggaagtttttgaataatattagaagttaaagagttaaagtagtgaaagtatttagaatttcggggtttattgaaagggtgtttgttattgaggggaatattttatttttttttttaagtgattattttgaatatggtattttttaaagtttataaagtagagttgagtttgaaaattaaaaagagaagtaatatatttaagaaaaatatattaagaaggaatttatatttttggtaatgaatgagaagttttattatttatgtgatattttattgggggattgaggtttaaatatttgattattagtagaaattaaggttataggttttatgtattgtaagaatttgggattatttttttgtttaatatgttaggttatatggaaaaagggaattaatattgtagatgaagttaaagttgttaattagttgattttaaaataggatgatgattttggtatatttgagtgggtttaatataattataaagatttttaagagtgggagagggagataaaagagagtaagagaaagaggtattatagtggaagaagggtagaatggtgtgatgtgaggatttgatttatttttgtttattttgaagatagaagaagggagttatgaattaaggaatgtggttagtttttagaagttgaaaaagtaaggaaatagatttgtttttagaatttttagaaagaatgtagttttgttgataatttgattgttgtttagggagatatatatgatagatttataatttatggaattgatagataataaatttgtgttgttttaagttattaagtttgtggtaatttgttagagtagttatagaaaattaatataacgtggttgattatttttttaaaatttttttgtagttaggtgtggttatatgtttgagttttagttaatttaatgttgttagaagtgatatgaaagttatttaggtttgtttgtaaagttatttatttatgatttttaagtttttttttttttgtttatttaaggtggattaatatgatgaatttaggagttattatttgaagatggtggagttattagttaagatgaatttgagtgtttaagatattgttgagagaagggttattcgttaatttggaatttttgttttggattttttataagtaagaaataaaattttattagggaaaattattgagattttaagattcggggttaatttaattagtgtagataagaaatataaaagagaagttataagatttgaaagatggaaggaaaatttttatatatatagtaattttagaagtagagattatagtttgttgttagatatagatataaatatgggtaaaatttatagtaattaaagttaaatttttttgtaattagaaagattgagtttatagaatggaaatttttgaatgtttatgagtgtgagattaattttatttattttgtttagagtaaatggaagtatttaggattttttattgtgggtgtgagatttattttatttattttgtttaggataattttatatttataaaaagttaattttatatttataaatattataattaaatgtagagtataaaaataaagagaattttgaaaatatatttatttaggaataaatattaaattagtgatagatttttattaataataataaataataaataataagtaaatggaataaatttttaaagtatagagggaaaataatgtttaattttatatttagttaaatttttatttaaggttgaaggtgaagtaaagttatttttagttatatgaaggtttagaaaattttttatatatatgtagagtttaaagaattagtaaaggattgtatttgggtaagaaatagaagagaaaagatataggatgtagtaaataatgttaagtaaaaataatgttgaaatattgttgtaagtttaagtaataattaattgtgaaaataaataattattttgtttttaaaaagaatattataaataagatggagaatttggaaagagtagtttggagggaagatggttaaataaaagttattatttagttttggaagaagatatcgattatttttaatttttaaagaaaaattaaatagtatatatgttataaatattaggatatataaaataaaatttagaaaaatattaagtaaaataaaagaaataaggaattttaatatattagtagaaggtagaaaagaagatttaaaaatgaaagaatagagtatagtattgtaagttgaaaatataatataaattggaaatatttagataaatatataataatttataatataaaatgaattaaatttatttattaggaaatagaaaattttatattgttaatatgaataaagttaagtaatatgttatttaaaaaagatataagataaaaataaatttttaaggtttaaaataaaaggatgaaaaataggtaaatattaattaaaataaaggtgttagaataatgttaatattagagtgtagaattgaagtaaaaaaatagttatgaggatatgagtggatatgaggatatgagttttagtagtatttagaagttatttagatatttatattagaaaataagagcgtttattttggtagtatatatattaaaattggaatgatatagagaagattagcgtggttcgtgtgtaaggatggtatgaaaatttatggtgttttatataaaaataaaataaaaaaagaagatgagaaagtttggaaattgattaagagttttatatagtaagttagaaaaaggaataaaaataaagtaaaagtaaagagaaggaattttatttatagatatatatagtttaagttatgataagaaaatggttttaagaattggaaaaggaaatttaagattattagattttgtagatgatatgattttttatatatagaatttaaaagaatttgaaaattattagaattttaagagtatagtagggtggttagatataaaatttatttttaaatatataatatataatttatattttaataataattatttgtaaaatttatgtagagagatagtattaatattcgaaataaaaaataagtatgtgtataagaattaatgtagtaaaagatatgtaagatttttttgaagaaaattatattatattattgaagggtatatgagaaaatttgaatagtaggtaattatgttaatgtatgggaataattgattttataaattaatttataggtttaatgaaattttaatgaaattttaatatgatttatagattttgagaaattatgaaatttttgtgtaagagaaaaggttaaagaatagttaatatatttttgaaaaagaataaagataatgtgttattttttgtaatgttataaagttttagtagtgaaagtaatggagtattggtttagtaaaagataaaagattattggaatagaaaataaaatttacggaaaaacgaaatatataagatgaagatggtattataaattagtagagaaagaatgtattagttaataaatttagttggaataagatgagacgaaatttttttagttggttttttagatgaaaggaaaattagattttatttgtattattattaaaattatttattaaaattaaaaaataattaataaagttttatttggattaaagttttatatgtagaaagggaaattttaaaattattaagagaaagtattagataaaatttttgtgatatttagataaggttaaagaaattaaaaagtagaaattttaaaagaaaataagagattgataaattttattataataaattgtgtggtgttgggggagagtgagtagaggttttttaaaagttaagagatagtataaaaatttaaagttaagagatagaattggatgagataattgtagatatttaatataatatataaaagttgattttttataataataaagaattattatagattaataattaatagataaatgggtaaagtaaatgaataagtaatttatatagggtgaagttttattagttagtaagtttatgagaagatatttaattttaggagtgagtagggaatgtagattttaaaaattgtatacgtatttaagtggtaataatagaaaaatatgataaaatttgggattgttattaatgtagagaaattggaaatatttatttatttttgtatgtttttatgtaattattaaggagtttaattaatagttattaaaatttaaaatatgtataaattatataaatgtttatatataatgtgaatattaattttattttagggtatgtatttcggataaatttttttttatttatttaaggattgtttttgtagtattatttgtgatagtagaaattggaaatattgagaatgtatcggtagtagaaataatagaaaaatattgtatatttataaggtggaatattatttaataaagtgtataatttggattttaaaattatattttgagagaaaaatgtaaatcgtaatgatattattagatagatgttattttagtaaaattaaatattaaaaaaagatattatattttgtttagtgataggtagagattataaatatatgtaaatagatttaaatatttaaaatatattaataagtttttgggaagaagggagtggaatatgtttatgataatttgagaaatatgataagaatattattaatttgttatatttaaggtgtgatatataagtgttaattatttttatatttaattttaaaaatttttttaaaagagaaaaaatatagaaaaaatagggtttgtaaattagatgatagtagaattgaaagaaaattataaagtatttatttagagagttggttgatggtgttaaaatatatatatagaaaatatgaggtgaattatgagagtttggatttttaatttttatatattagttttagttgttgttattttttttttaggagttaaagtttaggtttcgggagttattattgatttggtgatgggtattgatagttatttttattagttattgtatatgttttttatttttaaaaatgggtttaatttttagtaggtagatgttatttttattgttttaattttttttttttttttttttttttttattttttttttttttttttttttatttttattatttttttttttttttgtttattatttttattgtttttttttttttttagttagattattttaaattagtattagaaaattttatttattgtttagtatttatatgatttgatatatgataggattttttttttttttaaagtatttataatttagggaaatgttattaataggaagtaaatttttgttaagaagtaagataatatttattgtaattttttttggatttttttgaaaatataaataaaagaaagaaaaattaatttggatattttatttttgtagttttggtattattatagaggattatttagttaatatttttaaatatttagttaggtaagaaattggagataaaatttttttatggtttaatttataagtttaatgatattaaaaaaataggtagagtttaattaaggtaaatatatgtagtgagaagaaataataaattatatatgtaaatattgaaatagaagaatgtatagttataaggtaagttgaggttaaataaaagaaggaatggtaaaatatttatttagttgattgagaatttaagtttagtgataatatggtaaattataatgaatgtaaatgtgtatattgattgcgattgaatgtgtattttatgatttaaaatttgttttttagtgatgttatggaaatagattttttaaaagatttggagataaagtaaattatatggaaaattagttatgttattattgttgtttttataaaagtgtaaaagtaaatagtaatattgatattttgtagttgatttaaattatgttgaattataatattatttgttattttattaaagtatagttaaagatttatttagaaatgtgaagataatagtattttttttttagttttttttttgaaaatgagtgttttttttttatatttggtagttattgtgatgggaattaagtataaaatatattttttgttttataataatgttttttgttttttatggttttatggggattttaaaaacggtgttttaagtttgtagttttagtattttgggaggtcgaagtgggtgtgttatttgaggttaggagttcgagattagtttggttaatatggtgaaattttgtttttagtgaaaatataaaaattttttgggtttggtggtatacgtttgtaattttagttatttaggaggttgaggtaggagaattgtttgtgttcgggagacggagattgtagtaagtcgagatagtgttattgtattttagtttggtttatagagtaagattttgttttaatgaaaaaaaaaagggaaaatatattaagatgttaatagagttgttataaaaatggaaaatattattgaaatgtcgaatattttaatatgttgtatttgaaatttgttataaaaatttttatgcgttgtatttaatatttgttagaaaaatattaagaataaatttaattttaaaaaaattttggaataattatggtagtttttatatgtgatatatttaagttaaattaaattttgagtattaaattttatgtatttaaattaatataatgattttatttaatattaatatttttttgttagaagatttttatagttttaagttgattagtatatttatatttttatgtttagaaataatggagggaagattagtagggcgtgggaatttagaaatttaggatgattgagatttataggttatgttagggggattggaaagttagagaaatagttatttgggtttatgaattttaaagtatgatttattgaaataataataaaatgtttattgatttaagtttttttttaagaatgtaagggagtttagattagaaagatattaagattgtaggtttgtatattaaagatttgtaaataggaaattaaaaattaagatattattaaattatataagaataaattttttgattgtttaaaatttggaattagataattttaaatttttatttaggttgttatttttaagttttgtggttttgggtaagttattaatgttttttaagtataagttttttttttgtaaattagggataataatagtaaattattttttttatttaagaggtatttattaaggatttttttcgttgtggtgaggtgaatagattataagaaggtaagaggagtattaaggaaataaggtaggaggtaagagatattggtgtttgggtaaggattgttatggtggtggaaggtggtttgatttggagtataatttgaaagtattagagatgggatttgatggtggattggatgaagagagtaggaaaggagttaaatattattttaaggtagatagtttgagtaattaggtgaatataagtgttagtattagtgtgtagaagggattagggtttgggttttagatatgttaagagtgagatgttttttatatatttttaggatacgtgtgttatgattatataggttggtttattgtataaagggttaagggaattgaaatttataatagtgtttttggggtggggttgtatttatttgtaggaaggaatatttttttttaatatgtattaaagtaatttgtaggttattggaggttttggatagttagggagggatttttgggtagtttatttttgtgtggttgatagggttgtttgtagatatttaatattaataaaatgaaaaaatgtttattagaatgattaatatatagtaggtgttgagtatatgttaatttttttttttttttatagtgtgtagttttattttgtttattcgtgtatttttaaatttttaatattgaggtagttttttgtattggttaaatttggtattttggtagattgttattggagaggtttttttttaagaaatatgagatgtaaatgataatagtagataatagtagtatttttttgtatttttggaattttattgtataagttatattttaatgtgatgaatttttaagaatttattttttgatttttttttattattattatattttaagttttagggtatatgtgtataatatgtaggtttgttatatatgtatatatgtgttatgttggtatgttgtatttattaattcgttatttatattaggtatattttttaatgttatttttttttattttttttattttataataggtttcggtgtgtgatgtttttttttttgtgtttaagtgtttttattgtttaatttttatttgtgagtgagaatatgaggtgtttgattttttgtttttgcgatagtttgtcgagaatgatggtttttagttttatttatttatgtttttataaaggatacgaatttatttttttttattgttgtatagtattttatggtgtatatgtgttatatttttttaattcggtgtattattgatggatttttgggttggttttaagttttggttgttgtgaatagtgtcgtaataaatatatgtgtgtatgtgtttttatagtagtatgatttgttttattattattattattattatattttaagttttagggtatatgtgtataatgtgtaggttagttatatatgtatatatgtgttatgttggtgcgttgtatttattaattcgttatttagtattaggtatattttttaatgttattttttttttttttttttattttatagtagtttttagagtgtgatgtttttttttttgtgtttatgtgtttttattgtttaatttttttttgggtatatatttagtaatgggatggttgggttaaatagtatttttagttttagatttttgaggaatagttatattgatttttataatggttgaattagtttatagttttattaatagtgtaaaagtgtttttgtttttttatattttttttagtatttgttgttttttgattttttaatgatcgttattttaattggtgtgagatggtattttattgtggttttgatttgtatttttttgatggttagtgatgatgagtatttttttatgtgttttttggttgtataaatgttttttttttagaagtttttgtttatattttttatttatttgttgatggggttgtttgttttttttttgtgaatttgtttgagttttttgtagattttggatattagttttttgttagatgagtagattgtaaaaatttttttttattttgtagtttgtttgtttattttgatggtagttttttttgttgtgtagaagttttttagtttaattagattttatttgtttattttggtttttgttgttattgtttttggtgttttagatatgaagtttttgtttatgtttatgttttgaatggtattgtttaggtttttttttagggtttttatggttttaggtttaatatttaagtttttaatttattttgaattaatttaatgagtagttagtatttgtgagatttgggatgttgaattttttttgattatttagattattttttttttttttttagttttattgaggtataattataaaaattatatatatttaaggtattatagtgtgtgattttaatatatgtatatattgtgaaatgattgttataattaagttaattaatatatttattattttaaatatttatttttattttttattttgtgatgagaatatgtaaaatttatatttttagtaaattttaagtgtataatatattatagttattatgttgtatattgggtttatataacgtatttgttataaaattgtaagtttgtattttttggttaatttttgtttattttttttattttttaatttttggtaattatttttttgttgagtttaattttttaaggttttatatatatatgagattatgtagtatttgtttttttatgcgtggttaattatatttagtttaaggttttttaggtttatttatgttgttataaatggtaagatttttttttttttttaaggttgtataatattttattgtgtgtgtgtgtgtgtatgtgtgtgtgtttgtgtattatattttttttatttatttatttattgatggatatttagtttatttttttatttcgggtattgtaaataatgttgtaatgaatatgggagtgtaaatatttttttaggataatgatttttattttttttgaatatatgtttagaagtagtatttttgaattatatggtagttttatttttaatttattggaggaattataatattgttttttataatggttgtattattttatatttttaataatagtgtataagggtttttttttttttatatttttgttaatatttgttattttttgatattttgaatgtattttatttggtgtgaggtgtatttttttgatgattagtgatattgtgtatttttatttattagttggttgtaagttttttttgaaaaaatgtttatttaggtttttagtttattttattttattttattttgttttttttttttttttttttttttttattatattttaagttttagggtatatgtgtataatgtgtaggtttgttatatatatatatatgtgttatgttggtgtgttgtatttattaattcgttatttatattaggtattttttttaatgttatttttttttgttttttttatttcgtaataggttttagtgtgtgatgttttttattttgtgtttaagtgtttttattgtttagtttttatttatgagtgaaaatatgtagtgtttggttttttgtttttgtaatagtttgttgagaatgatggtttttagttttatttacgtttttataaaggatatgaatttattattttttattgttgtatagtattttatggtgtatatgtgttatatatttttaatttggtgtattattgatggatttttgggttggttttaagtttttgttattgtgaatagtgttataataaatatacgtgtgtatgtgtttttatagtagtatgatttataattttttgggtatatatttaataatgagatggttgggttaaatggtatttttagttttagatttttgaggaattattatattgttttttataatggttgaattagtttatatttttattaatattgtaaaaatatttttatttttttatattttttttagtatttgttttttgattttttaatgattgttattttaattggtgtgagatggtattttattgtggttttgatttgtatttttttgatggttagtgatgatgagtatttttttatatgtttgttggttgcgtaaatgtttttttttaagaattgtttgtttatggattaaggtttatgaatagatatgaattttagtttattttaaaattagtttatttgttttagttgtattttgagttgtattttgtttttgagttgtatgagttttttatatattttggatattgttgtggttttaatgtttttttcgaaatttatgttgaaatttaatttttaatgtgatagtattgagaagtgaggttttaaagaggtgattatattatgagggttttatttatataaatggattaatttattaatggattaatgagttgttaggtaagtggaattggtggttttataagaagaggaacgggtcgggcgcggtggtttaagtttgtaattttagtattttgggaggtcgaggtgggcggattacgaggttaggagattaagattattttggttaatacggtgaaattttgtttttattaaaaatataaaaattagtcgggcgtagtggtaggcgtttgtagttttagtaattcgggaggttgaggtaggagaatggcgtgaattcgggaggtagagtttgtagtgagtcgagatcgcgttattgtattttagtttgggtaatagagttagatttcgttttaaaaaaaaaaaaaaaaaaaaaaagaagaggaacgatttaagtatagtatgttagttattttgttatgttatgttttgtattattttaggaatttgtagagagtttttattagtaagaaggtttttttgcgttatatgcgtttttttagttttggattttttattttttataattgtaagaaataataatatattttttttttttataaattatttagttttagatattttgttataagtaatagaaatagattaagataaatattaattatttattagatatatggtttgtaaatatttttttttattttgtgagttggtttttattttgttgattgttttttttgttgtttagaaataattttgtttgacgagatattatttatttttgtttttgttattgtgtttttggtgttatataaaataatttgtaaagattaatgttatggaattttttattgttttattataggagttttatagtggtaagttttatattaaagtttttaatttattttgaattgatttttgtgtatggtatatgataagggttaatttttttttgtttttgtatatggatattcggtttttttaataatatttattttttttttattgggtatttttggtaattttatttttttttttgttaattttttgtgtggatgttttatttattgttaataatgggttattgaagttcgttacgattattatattgttgtttttttttttagttatgtaaatattatatatttaggtgttttgatattatgtgtatatgtatttataatttttatatttttttgatgaattagttttttataattatatagtgagtttttttgttttttgttataatttttgattaaaagtttattttgtttgatgtaagtatagttatttttatcgttttttgttttttatttgtatggagtattttttttttatttttttatttttattttatatgtatttttagagttggagtgtgtttgttataggtagtatagatagttgtaatttgtttttaaatatatttagttattttgtgtttttttattagaaaatttaatttatttacgtttaagtaattattgatagttaaggatttaatatagttatttttttggttgttttttggttgtttagtatattttttttttttttttttttgtttttttttgtgatttgttgattttttgtagtggtatgttttaatatttttttgttttgtgtatttagtataggtttttggtttgtggttattataagtttatataaaatatggttttaatagtttatttgaagttaataataatttagattattaaaatagattatatataaaaattttatatattattttttttattttttatatttttagtgttaaaatttatatttaaaaaaattgtatatttattaataaattatatatttttaatattttgttttttaatttttatattagtattaaaagttatttatatattattattatagtattagaatattttgaattgattgtatatttattttattagtgaattttatatttggatatgtttttattttattaattattggttttttattttagtttgaagaatattttttagtattttttgtaaggtagatttattggtgataaatttttttagtttttgtttgtttgataaagattattttttttttagatttgaaaaatagttttacgggtaaagagttattggttggtagttttttttttttagtaaattgaatatattattttattatgtattggtttagaaaatgtttgtatagaagtgttaatatttttttgatgtatttttaaatgtgatatgttttttttaagattttttttttaattttgattattgataatttgatataatgttttggagaagttttttttgggttaaatataattggagagttttgagttttatatatcgagatgtttatatttttttatagatttggaaagtttttagtaattatgttttaaataagtatttattttattttatttttttttttttttgagattttaataatgtaaaaagttagtttttttgatggtgttttataaattttgtatatatttttttattttttttttttgtggttttttttttttttgtattttgattagataattttaaatgattggtttttgattttttttatttttttttatatttgatttattattttggaagttttttattttttttttgttttagtttaggtattatattttttagttttaaaatttgtatggttttgttttgtttttttttttttttgttgaatttttatttttgtttttgtgttgtttttttgatgttattatattgtttgtgttgttttgtagtttattgagtttttttataataattgttttggatttttttgttaggtaattggtggattgatttttaggtaaatttttatttttgggggttagttattgaaatattattgtgtttttttagtggtgttatgtttttttgatttttatgattttgaagttttgttttgtgtttttatatttgaagaaatagttattttgtttaatatttgtttgtgtttattttataggtgggattttttttttttttttgagagaaaattttattttgttatttagagtggagtagtggtatgatcgtggtttattgtagtattaaatttttgagtttaagtaatttttttattttagatttttgagtagttgggattgtaggtgtgtattattatatttaattgattttttttttttttttagagacggagttttattatgttgtttaggttagtttcgaatttttagttttaagaagtttttttgtttcggttttttaaagtgttgggattttaggtatgaattattatatttagggtagatgggatttttaagattgtgtttttttttaattttgtaaagttagtttaggttttgagagttttttttttgttttttttagggtggtgttttggaatttttaagtttgtgttttttttttcgattttataaagttaaattgattgtgagatgtttttttttgttgtttatggtggtttatttggggatttagtttagatgggagagtgaaatgtgtgaaaggcgtgtttgtgggttagtagtgtaaggagtataggttacgtattttaaatggtaggttttttgatgaggttttttgatgagtgggttttgtagttttttttttttgtttttagttttttttaattatttaattatgttgattattttaatgttttgggtggagtgagaaataagtgggtttatcggatagtattttgaatggttgggggatgtgggtatttattaaattttgtatattttttttgtgggagaaattgtgggttaagtgggtttgttttagtattgagttgtgttattttgggggaggagtgatgtgggtaaagtgaaattgttttttttattttttttaatatatttgttttaggattttataatttgatagcgtgttggaatttttttgttggatttttggatttttataatggtattgttttatttgtggatagttgtttaaattgatgtttttgtgtgggaagaaagtttttattttattattttgttgatgttttttttttatattatttttgttaaataattaggagttggataggagaggaattgtatagttttggggaaaatggtgttttatagcgtgatggtgaatatttgtgaatattttttagaatattttgtatttattttgatttttttttttttttttttaaattttggttagtttttatagttttttatgttgtggtaggaagaagtttgatttttttttaattttataaaaatttttatatatatttatttcggttattatatgaagtgtttagagaattgaagaaaaattataagatttttaattttttataaatagatttttatattaattttttagtaatataataatttattattttgtgttgaatatgtatgtcgggattttaaaagagaagataaaaatataatgagattttattttaataagtgagtttatattattttttgttagatagaaatttgtttattttttttttttttagatttttgagaagaaaaattttttaggaaagaaaaaaatatattaattttattaatagtttattaaaaaataagtttatcgggtcgggcgtggtggtttacgtttatgtttttagtattttgggaggtcgaggcgggtggattacgaggttaggagatcgagattattttggttaatacggtgaaatttcgtttttattaaaaatatataaaaaaattggtcgggcgtggtggtaggtgtttgtggttattgtttagaaggttgagagaggagaatggcgtgaattcgggaggcggagtttgtagtgagtcgagattgcgttattgtattttagtttgggcgatagtgcgagatttcgttttaaaaaaaaaaaaaaaaaaaaaaaaaaaagtttattattagttttaatttaattattaaaagatttgttagttttttagatatttttattttttttaggttttattttagaaaataaagagggaatgttatggtattgtgttttttatttttgttgtttatgatagatgaattatagaggtaagaaggagaaggatggattaagagtttaagtgtggggtatggatagtaagcgaagtgattgagttatttttttttttttttttttaatttttagggatttatatgtttgtagcgtgtgtgtgtgtgtgtgtgtgtgtaattatttttatatttataattttataattttatagttttggtgtagttggtgggtttggtgtggataattttagtggtttttagtaagaatgagaggtagttttagtggtttttgttgagttttggagataggattagttagaaagagagaaagagggaaggaaagagagagagagagagagagagagagagagagagagagagagagagagagagatagtcgagggaatatttataggtagttttggtgagtggatattgaaagagaatattgagtgttggggcgtgagggttagggatagttatggtatattgaaattagtggtattggtgtgtttttttaaaaaagtagatagcgtattgttatttttttataatttttacgttttaaaatttgaatttgatatttagttttttttttagttaggtgaatttgagtaagttttaattttttgagtataaattttatttttttaaatggggataagttttgtttattttttttattatatggtttttaaagtgtatttttatatatattattttattttatatttattttatttatattttaaatatttaggaaattgtttcggagcggttttttaatttttttaatattttggaagtagatagaagatggaaatgaatttttttgatggttttaagaaggagaattatttattttttttgagaaaaatgtataattttttttgagaaagagagagaggagtgataagtatttgaatattataaaaacgaaagatatgttgatttaataaattatgtttaaatggagatgagttgatttatattttaaagagtatatttttttattaattgtttagtagtttttaatttatttatttttattatttttatagtttagaagtttagtatttagaaaaaaagggagagtatatgattttgttttttgattattaatgaggttttatttaagattttgagaattaatgtaaatatgaatttttaatggtgaataatgatgtgaattaatttattttgtaggaattaggaattgtgtataagttataagagttgacgatgataagtgattgtgttaattattaattttataatattagttaggttaaatgatagttagaaggagttttagagttttttttattttttgatattttagtagttagttttttggtttttgttttatattaattttgtgttattttttttaataattttggtatttttttagatttttttatggaaagttttttttaattttttatattttgaagttggtattttttttaattataattattttaattgtgtttatttttattattttaggatatattatatttttcggttcggttattttattgaggtcgtttttatgaatggatttaggttttttattgaattatttgttttagtgtttgaattggaatagttttttgttgttgtttttagattataggaagtatttgaagggagttttagaattatgtaggtttatttagtattaattaattttttttaaatttagtttggtatttagtattgtttagaaatttttggtagattttttttatttatttagaagtagtttagtttatgtaatggtgtattatgtaaggttttggaaatataattgtaaataagatagattttatttttgatttgtgaaaattttataagtattatatttattttttttatgagtataagtatttattttgttttgaattgtatttggagatatatatttttgtggaagaattaggtaaaatgtttttattagttatttaggagaagtgttttttttttgattaaattttttttattttaagttatgttttttgtttattaaggtggtttttttgatataatgtattgttgtttttatttattttttatattttttattagttttgttttatttgtttttttatattatttatgttttgagggtttataggtattgaggatgggaaatagggagggaatatagttgattagaaagttgtgggagagaaatagaaaaatttaggaaagagagattttatggtatagaaataggttttagtttttatgagttttatttttattttatcgataagtattattttgtatttgtttttttttattatttttttaaattaagttattaaaagtttttaattttttttatataatattagatattggtgtttagtaatatattgtttttttatttttattaggtaattttttttggagtttaggtaatttttttttaaaatatttttattatttttgttaaattttgtgattttttttttttttttttttttttttttgagatggagttttgtattgttatttaggttggagtgtaatggcgtgatttcggtttattgtaattttcgttttttgggtttaaataatttttttgttttagtttttcgagcggttaggtttatagttatttgttattatgtttagttaatttttgtatttttagaagagatagggttttattattttggttaggttggttttgaatttttgattttgtgattcgttcgtttcggttttttaaagtgttgggattataggcgtgagttatcgttttcggtttatttgtgattttttttttgatattattgataatgtaaattttgggagttaaaagtgtagggataattattaataggttagagattttttgatttaagtattgaaatagatttttagaatattggtaaagtttttagttgtttgatgagtgagatgaatttagattgaattttggtatttttttttttatggtttttataggaaatttttattttgatttattattatttattattttgtttacgtcgtgtttattttgttaataaaatagttaggatggtaagttttagtagagttaggatgatagttaaagttatttttgaaaataaaaatttatttgtaaatatgtttatttagattaggaaattattagaaataatttttgattattttttattatttattagatagattttttttttttttttttttttgttattttaatttttttatttttttatttgtcgtatattattgtttttatattttcgtttttgtttatttttagttttttggtcgtatattaagaattttagatgttgtgtatttttggtttagagttggaaatttgatagattttttttttagttgaattttttattttttaggtaggaagaatgttaaagggaattagtggtttacgaagttatttattggggtatggggaaaatattagaatttttattttttgtgtaattttaatttatatttttaaagttgtaagattttttgtatatatatatatatatatatggttataaataagatttataaatatatttttataggtaatgtatatttaaaatatttttattagtgagtgattaaaaaatttttagtattttgattgaagggtgttgattgaaggtggttttattaatgaaagttatagtaaaggatagaaattttttgttatagaaaaattttttagttattatttgttaattttttgatgataagatggatatttgcgaggtttgttattgtggttagtaggataaaatatgttgggattgtttaatttgtgtttgtttatgtgttattgatttgtatttaattgatgtaagatagagttttgtagttataggagagaaaaattttagataatattatatggttataaagggtagtggttatgaaggatcgggggagaaaaaaaaagaaaagagagagagagagagagagaaaggaaagaagaaaaaaataattataaaattgtttgtgaaagtaaaagttttgaagaatattgagttttgaaagattaggaaagtagattatatttatattaagattattttaaacgaataataggtgaatttattttaagatataataatatatttttaattagggtagattaggtatttgtttattgagttttttaggtgtttggttttgtgagaaaatttttttgttaaattaatttttggagatttttttttaatgtatttttaaaatgaatagtaagtagttaatatgttttttattatgtgaatttttttttttagtgttaaataatttatcggggaggaaaggataattagatggtgtatttagtattattgtatattttttttttttttttagtgtttgaaatgttttgtttatagggcggttagaagatggtttattttattaatagggaaaatgagaggaaattattatttttgagttgaggtagattatatagagtgattatgttataggaagtgagataatgggttaaggaattttttttagtgttacggaggatggttattttttttgtttagtttaaattttagaaattaaaggagaaattagtattattagtttagagtttagttaattgtgggttgttttttttaggtttttagaggaattaataagagtgaaagaaaaaatattgaatttgaaaaggaagtaggtaaggaagataaagtagttgtgttaaagtttttaagtttttaagaggagatttttgaattattagagttgaggaagttttaaagagggagttagtttatatttaagattgttattttttatgtattgtttttattaggtttcgtattatttggatttttttgttagagagagattaagataaaacgaaaaatttaagtttattgtttttgagtaatatgaatttgggtgttagggaggtttttgtaggtagagatgtagaggattattgagaaattgcgtggagtagattgattagatttaagtaaatgatgggagtgtggtttgtgaaggttttagaatttgtgttataatagagatttagaatattagtgaggtaggagaaaaggtagaggattaaaaggttaggaagatttaataatgttttggaggattttgaatttgtataggatattggaagggaatttattttttttgggttttagaattatttttagttttttagagatttttaaggttagagattgtatattattaatttttgtaatttttttttttaattttttttgaagatagagttttatttttgttgtttaggttggagagtagtggtattatttcggtttattgtaatttttattttttgggtttaagtaatttttttgttttagttttttaagtagttgggattataggtatgtgttattatatttagttaattttgtatttttagtagagatggggtttttttatgtcggttaggttggtgttaaattttttattttaggtgatttattcgttttggttttttagagtgttgggattataggcgtgagttatcgtgtttagtttaatgtttgtaatttttgaggtagagaattttttatagaataagtattttataaatgtttgataattaaaaatgagaaaaatgattatatttaaaaagaggtagattggataaagaaaatgtggtaaatatatatcgtggaatattatataattataaaaaataatgagatgatgttttttgtagtaatatggatggaggtggagattattattttaagtaaattaaagtaggaatagaaaattaaatattatatgtttttatttataagtgggagttaaataataagaatatatggatattaagaggggaataatagatattggggtttatttaagggtggaggttaggaggagggagatagtatattttttgggttttatgtttattatttaggtgattaaagaatttgtatattaaatttttataatatatagtttatttatataataaataattatatatatgtatttttaaaattaaaagttaaaaaaagaagagttttgaaataaatgaaggtgaataaaggaagttaagttgttggagttagatagtaagaagaaatttagtttagaggtttatggtgttaggaagagtgagttagtaaatgggattttataagttattgtggagaataaggaagagtaataatatgttttattgagtgtttattgattataaagttttatagtgggtattttataagtataaatttgtttaatttttaataaattgtacgatgaaattttttgagatggagagagatattagaagttatttagttaataaatggtagagtttttgattttaaagtttatattgtatttataaagttatattttgttttagttttttatgtattttgtggtggtgatttttaagttaagaagttagttatttgaagaggaaggtgatgatttttagttttaggatgttttatttgttaaaaataattttaaaattgttgagattatttttttataagtgttttatgtatatttatggaatattattaaatatataaatatatgaattatggaagtattaaaagaagaaaaagaggaaggggtagtaagtttaattaatggaatattatttgaaaattttttaaattttgagagggatatgaatattcggattgaagacgattaaagtattttaagtaagtttaatttaaaaaagatatattttaagatatattataattaaattgttaaaggttaaatataaagagagaattttgaaagaaatattatgtgtaagagattttttataagtttattattagattttttaacggaaattttgtaagttagtatttttaatttgtagaattgttatttatttttataatttttttttttgatatttttaaattgttgagatattatttttatattttattttttagatatgttttattttgttaattataatgtttgggtttttttagaaatagtttttttttattattttttgtgtatgggttatgattttttttttttttatatgttttattattttttgttgaaatttagatattttgaatattataatgttgtaatttagaaattagattttttttttttatagagtttgttgttgttgtatttgttgtattattatttgtttgtttgtttgtttaaagatttttttgatttaattttataaagtttttatttttttttgaatgtaacgtttgatgtttttgttcggttagtttagttattagttaatgattgaatagagataatgtttagaattaaagtaaatattatgttagtttgtgttaaggaattttgtgtgtgtgtgtgtgtgtgtgtgtgtgttgaggtatatttttaatatttaattagttttatttttgtttttttaataaatgtttagtgaatttgcgtttagtaaggtttaggttattttttttttataggatttaaagtaaattaagggggattttggtaagtttttagatgatttttatagatatatagaggttttttagatttttatttatatatttaaatttttttggagagatgttatgttatttttgaattagattttgatggatattgagaagtaggtcgttttgtaagtagtaaagagatttgggaatgagttttgtattatatatggtattagggaagggagtaaatattatttaattggaagagaagtagtaaaagtgaatgattttaagtgggattttaatgataggtggaagattggaagaggagacgtttttagatgtgtataatggaaggtttttgtaggattaagattaagttttttaattatattaaattgtttatgatcgacgaggtatttgatgaaaattttgttgtttttttggagagattaagagaggttttggtaaagtatatttgtttattttttgatttagtagagggatagttaattttaaaggataaatttattatttaggtagtttttgattttaggaggaagttgtagaaacgggttttgggatcggatagtatattagaggattttttgaaagtggttattttggttttttataatatagatagggaggtttaggaaagagagaggaaatataggaaagagatagaagttttaatggttattaggtaagtttataaattttagaatttttagggtatatttgttaattattaaagatatggttagaatagttattttattttaaaagtttatttatttttatataaggtttaattttttttattagggtgaaatattttagggtataatgttgttgttagtatattttattttttatttttgtaatttttggtattaattttttttttttgtataatatacgtatttattatagtatgtatagtatgtatgtatgtagttatagtgtgtataatttgggtatatatatttaagtatatataatttatgtatatttaattttataaaatttgtttttttttttatatttggaagttattaatttttaaatggttagggaatcggagttttggatggtggtttttttttgttaggaatttttatatagatttttgggaagaatttgattgtcgttttttttaaaacgatgtttttattagtaggaagtagttaagatttattattatttatattcgaatagtagttagacgtatttttttagataggggaggtgatatagaagaggggtagggaagtgttggtaagggaagggtatggtttttggttaaggttttatttttgggtttgtgtttatagatttaggtaaggatagatatttttgtttttatgtttaaatgttgtattttttaagattattttggtttgttatgtttttattttgtgtttgtaaaaattttgagattttagtaggtagggatagaagcggttggacgttaaaaggaatatattagtggaagaatatataagtggttggatgttaagagggatatatcggttaaagattatgttaataggaattagtagatgttggtacgttggtaggttattgattagcggaataaaatggagtttggttagggtagttggaggggaatttagttgttgagtagtttgattttaggggaaaattatttttttattttattttttttttggtttttttatttgttgagagttatttttatttaataagattttgtttttattttttaagtttatatgtgatttgatttttttggtatattaaggtaagaatttgggatatagaaagttttttgtttttgtaataaggtagagggtttaattgagttagttaatattagttgtttatatatggtaaaattaaaagagtatatagtaatatatgtttattggggttttaggaattgtaaatatatatttttagatgttgtcgtgaggttagagttttatattttgttcgtttgtatgttttttttagaggtttgagtagtagggtattgaagaagtgagttattttcgttgttgtaagttttgtgagggggataagaagattttttttattttagtattttagaaggtggtaattgttgtgaaaagtgaaaaagtaagttagtgaaagagaattattggtagttgtagtgggatttcgatttaaatagattattttggatatatttttgtgagaaggtaatatttgggggaagtagggtagatatttaagtggatttttgagtgaagagttttttaggtagagaagataattatagtaaagatcgtaagataggaatgtgtttggtgtttttaaggaatatgaagtggttagtgttattggtatgaattgatttaggaaaataatagtaggaaaataagttagaaagataatggattagttaggtatggtggtttatgtttgtaattttagtattttgggaggttaaggtgggaagattttttgaatttaggaatttaagattagttggggaaagatggtaagatttcgtttttataaaataataaaaaaattagttaggtatggtggtatgtatttgtagtttagttatttagaagattgaggtaggggaagattttttgattttaggaggttgaggttgtagtgagttatgattgttttattgtattttagtttgggtaatagagtaagatttcgttttaaaaaaaattgtaatatttagtgagttattgataggattttgattttaatttgaatgaaataaagagataagatgggttattatgtaggtaaatgatacgtttttatttatgtttgtataaagatataaaataattttgttgttgtgttaagaaaagatagtagtgggaggaaaagaagaagtaaggagattattgttaagagttatttaggtaattattgatagtatttttgtttagtttgtgaattattaaagtggtgaaatgtatttaaatttgtagtagtattttttttattggggataagggaatgattgttaaagattgttaatatttaggtattaaggagaatataaatataagtatggaattttatgtagattagggttaaagggtttaaggatatatttgagataatgtttgaaaattaaggaagggaagaaaagtgaatagaaatagagttaagtgggagtagttgttagaaaagaaagtaatgtttaattatatagttgtttattgattaatagagggtttttaaagggtagttatttagataagaattttttagatgagagtgtaatttcgttgagcgtagtagattttaattttaggttttttgttatagatattttttttttttgatgatttttttaaatttatattttatatttgtaaatatattttttttttttttaggttttagaatttgtgttttaagtttacgtggtttagatgggatttaataagaaaagtttgttttttttttgggttattgggtttaattagttggtaagttttagttttgattttgttttttaatttttagaataatagaaatatagggtattttagtattgtaatgataaattttgataaaaggatatatattagaggtggggatttttaataaatattggattagagtaaataaaattgttatatgtagttggtattattgtgtatttagaaattgtaagaaatattatagttaaatttttggaattaataagtttattaaggttattaaatataagaataatatttaagaattaatatatttttataagatagaaatgaagagaatatataatttgaaaagaaaatataatttatattattattaaaattatatattatttaggaatatatttttttaaaaagtttaaaatatgtggattaaatgtaaaaaaattttgttttatagatatttagatatagttatagttttttataaataaagaggtatgtatagtttttagagtaaaaataaatatatattttattttattttatttgtttgttgtaaaatttttgtgatatattggttttttaagtaatatttggaaatagggtaatattgttgagaaaataaatatattatatttagagattcgaaatgagaatatatattttataaattaaattatatattttgatattttttttaaaaattatatttataaattgtatggtaatattaatgtttatttattttttgggttaatttattaaattattatgatatggataataattttttatggtaatgttaaagatggtatttaaatagatatttgatagatagatagatagatagatagatgatagatatatatataaaatttgtttgatttttattatttttatatttggagttaaggggttaattgagttaggtgtaatttgattttttttattttaagtaaaatagttaggtatagaaagataaatattgtgattttatttatatatggaatttaaaaagttagatttataggagtggagagtagaatggtgattataggttggggaagtggggcgaatatggggaagatgagaagatgttggttaaagagtataaggttttagttatataagagtaatatgtttttgaaatatattgttaataataatgtatattttataaattacgaagaggaaattttagtttgttaattaaaaaaaattgataagtatgtgaagtgatgattatgttaattagtttaatttaattatttattatatagtttaatttaataattttattatatataatatatagatttatttttatatttttatatatttgtatatagttatatatatttatgaatatgtagttatatattatttatatatagttatatattagtatatatatttatagtttataaatatatgtaatatataatatatattatgttgtatataatatatatgttgtgtatgaaatatataaatagttttgaggtatatatatttgttaaaatttgatattatgttttataaatatatatattattttttattataaaagaaaatattaaatataaattaaatttatttatatattagtaaagtatataaaattatataaatattgaaaataaatttatgtaaatatagatatatttttttatttaaaagattttttatagttatggattggaaaatttaatattattaaggtgataatattatttaatgtgatagggagatttaatgtaattttttattaaaattttaatggtattattttttggatagaaatagaaaaattttttttaaaatttatgtggaatataaaaggattttaagtaattaaaataattttgaaaaataagaaataaatttgtaggatttttattttttagttttaaaatttaatataaagttatagtaattaagagtatatgtagtattggtataaagaaaaatatagagataaatggagaagtattgagaggttagaagtgaatttttaatttatttattacgggtgttaagattatttaatggggaaacggtggtttttgataaatggtgttgggaaaattagatatttatatgtaggaagaatgaagttggatttttattttaagttatgtgtaaatttaattaaattgaattaaagatttaaatttaagtgataaaattgtaaaatttttaaaagagaataagggaaaaatttttatgattttggattaggtaatggtttttttaaaatgatattaaaagtatagattataaaagaaaaattatataaattgggtttcgtaaaaattaaaaatttttgtgtattaaaatatatttattaagagagtgaaaagaaaatttatagaattgtttgtatagatgtaaagattttaattaaaatagtaagataaatttagtaaaaaatatatataattaagtgtagtttaattttaaaaatataaattttgtaatatattaatataattatgaaattatatatttaatataaagtaaaaataaaattaaaaataagaaaataaaaattatataattttagatggtataaatattttaaaataaaagttaatatttatttatgattttaaaaataaaataatagtagtaataatattttttagtaatgtaagaatagaagaaaattttttgagtttattaaatagtgttagggaagaattaaaagttaatattaaaaatagtagtgttgtattgtttattttatttttaaaatcgagaataagaaaagaatgttttttattagtatttttagtagtgaggaggatttggttagaagaataaagtaaaataattaattaattaaaagtaataaagattggaaagaaagaatatagtattgttatttatatataatgtgtttaagtatttagataatcgaatggaatttataaaattattaaatttttagaataattaattagggattttagtaaggttttagtgtataaaattaataatgaaaataaattttatttttatatattagtaattaatatttggaaaatgaatatattatttataatagaattaaatagtataaaatttttaagaatatagttaataaagtatatgtaagatatttatattgaaaattgtaaaattttttagataaaaatttaaaaatatttatataaaggaagagatttaataaaagtgttgtatttagattatttgaagaatttttttaattttataaaaatattaaataatgtaataaaatagaataaagatttgaatgaatattttataaatgaagatagatgattaaagaatttaatataattattaggaaaatgtaaattaaaatgagttattattttatatttattgatttggatataatttaaaaggttgaaaatattaattattggttatgtggagttattgaaatttttatatattgtttatttgaatgtaaaatagtgtagttattttggaaaattgatttgtagtattttataaaattaaatatatatttattttttgatttagatattgtatatggaatgaaaagtataaaagaaatgaaatatgtgtttataatagatttgaaagagaatgtttatagtaattttattaataatagtttaaatttagaaatatttaggtatttattagtagaaaaatgagtggaaaaaattgaagtatatttataaaatgaaatttaatttaaaatattaaaagaatatatatagtaatatatatgattttaatattatattgaatgaaaaaaattagatataatagagtaaatagtgtattattattatatgaagttaatgaaaaggtaaaattaaattttgatgatgggaattagattattggttgtttgtgaaaaattaatgttttttgtttggattaaggtatgaattatttgggtgtatttaattgttaatatttataatttgtgtttgtaaaaatatttgtttgtaaattatattttaattatttaaaaaagagagattataaaattttgagtttgagagtagaaatttaagtttaatttttttgagttttttaagattattgggttgaaagggagatagattttagtttattttataatattgatgatatagatttgaggtgagagaaaaaaaatattttttattattttaatgaaatttatgtttttttatatttataattttttttaattttatgtttttggaaaattttgtttcgtaaatatggaagagaaagttatatttttttttttaggaattagaggttgttttaacgtttttttttatattatttttttttataaatttagtgtttttaaaattagttaggtttatagttaagtaagtttgtaataataaatatagtaagtggaattgttaattttgttttttttaattttttgaattagtaaaatattttttatttaaagggaagaaaagaaattttgtgttaggaggatataattgttatttttttagaaaagaatgttaatttatgtatttttttttttgtttttttagagagagagatagggtttttttttgttatttaggttggagtgtagtggtatagatatggttaattgtagtttttattttttaggtttaagtaatttttgtttttttgttttagttttttgagtagttgggattataggtatgtgttattaaatttagttaattttttgatgtgtgtagaaatggggttttattatgttgtttaggttggttttaaatttttgtttttaagttatttttttattttggttttcgaaagtgttcggttgttgggattataggtttgagttattatattagtttttttttatttagaaatagaataaaggtgagggggtaggtaggtaggattaaataaataaaaaatattgttttttgtgaatgatcgatttaattaaattaaagattatgtattaaaattttgtattattttttttattgataattatatttttgtatagttttttatattatagtaggagtggtttgtatgattagttgataatagtagaaattatggtatgttattttttatattaggttatgaaaatattaaagttttttttttttttttttattttttttttttttttttttttttttattatttgttttgggggaagttagttgttaaattttaaagatatttaggtggttcggtggagaggtttattggtgaggaattgaagtttttagttaatagttatgtaatgagtttttttgtaaagagatttttaattttagttaaggatttagatggttgtagttttagttaatggttttattgtaatttatgagagattgagttagagttatttagttaagttgttttaaaatttttgatttgtaagataatatgtaattgttgttttaagttattaagtttttaggtaatttgttattagtaataaataattaatttattaagaatttgttataagtgtggtttttttttggattatgattatttatttattatagtggtttttaaaatgtaagtttaagttgaattttagtagtttttttttgaatgtagtagttttgtttttgatatatgatttttttttagtttaattgtattaaatatttgaaatatagaaatgtttgtttggatttttattatgaatttttattttttttgatatcggaatttggttgttatttttagaatattttttattaagatattattttaatttatggttttattgttaatttatagatatttgttttattatagagatttagtgatttttatgtgagatttttgtttttatatatgttaattttttttgttttatttgtttatttaatattaattagatgttaataatggaaaagaaaaaaattaagaagtaggagtttaagatattgtgtattggtagggttattgtttatttttgtcgtattttttttttttgttattttttagtttagatgttttggttttgtgtatagtgtgttttattttatgaatttgaagtaaagagaattaaaaggatgaagagttttaaattttttgataatatttaagagagaataggaaatttttttttttttttttggaagtttttgttgatgaatgaaaaattgggttttttttatgtaatttgtcgatggggaggtaaaatttgtttagaaaaaataaaaatgtttttattgtgttatgttattagaattgtgatttgaagtttggagtagaatttatttatgttatttattttaatttttttaggtagtggtattaggagttttattttgtttaaatttggtgtttttttatcgttatggaaggaagttttgtattttttttatttttttaatttttgattttaatagaggtagtttttttttttttttttttttaattgattatttttgggtgtttttcgtagagggggatttggtagggttataggataatagtggagggaaggttagtagataaataagtgaataaaggtttttggtttttttaggtagaggattttgcggtttttcgtagtgtttgtgtttttgggtatttgagattagggagtggtgatgatttttaacgagtatgttgtttttaagtatttgtttaataaagtatattttgtatcgtttttaatttatttaattttgagtggatatagtatatgttttagagagtatagggttgggggtaaggttatagattaataggattttaaggtagaattttttttagtatagaataaaatgaaaagttttttatgtttatttttttttatatagacgcggtaattattcgattttttaattttttttttattttttttttttttttattttataaaatcgttattgttattatggttcgtttttaatgagttgttgggtatattttttagacggggtggtggtcgggtagaggggttttttattttttagtaggggcgatcgggtagaggcgttttttatttttcggacggcgcggttggtcgggcggggggttgattttttatttttttttcggatggggtagttggtcgggcgggggattgatttttttatttttttttcggacggggcggttggtcgggtagaggggttttttattttttagtaggggcggttaggtagaggcgttttttagttttcggatcgggtggttggtcgggcggggggttgatttttttattttttttttggacggggcggttggtcgggcggggggttgattttttatttttttttcggacggggcgtttcgtttggcggggggttgatttttttatttttttttcggattgagcggttggttaggcggggggttgatttttttatttttttttcggacggggcggttggtcgggcggggggttgatttttttatttttttttcggacggggcggttggtcgggtagaggggttttttattttttagtaggggcggtcgggtagaggcgttttttatttttcggacggggtggttggtcgggagggggttgatttttttatttttttttcggatggggtggttgtcgggcggagacgttttttattttttagacggggtggtagtcgggcggaggggttttttattttttagatggggcggtcgggtagagacgttttttattttttagacggggcggcggggtagaggcgttttttatattttagacgatgggcggtcgggtagagacgttttttattttttagatgggatggtggtcgggaagaggcgttttttattttttaggtgggatggcggtcgggtagagacgttttttattttttagattgggtagttaggtagaggggttttttatattttagacgatgggcggttaggtagagacgtattttattttttagacggggtagcggtcgggtagaggttgtaatttcggtattttggggggttaaggtaggcggttgggaggtggaggttgtagttagtcgagattacgttattgtattttagtttgggtattattgagtattaagttaacgagatttcgtttgtaatttcggtatttcgggaggtcgaggttggcggattattcgcggttaggagttggagattagttcggttaatatagcgaaatttcgtttttattaaaaaaatacgaaaattcgttaggcgtggcggcgcgcgtttgtaatggtaggtattgggtaggttgaggtaggagaattaggtagggaggttgtagtgagtcgagatggtagtagtatagtttagagggagattgtggaaaggggagagggagagggaagagagggagagggggagggggagggggagggggagggggagggggagagggagagggagagggagaggagagggagaggtttaatttataaatataaatttttatgagaaaaattttaattattgaggatgtttggtttgaaaagaagattagttattattagtattagtattattgttattattatttttgttattagtgttattataaatattggaagttaaaatgaattaagtgtttattatagagaagttatagtattaagttttttatacgttattttatttattttttataatagttttgtgttgaatgttataattatttgtattattatgagagttaggtgtgtttgaaagaagtaaggtaacgttattaagattagagttattaaagaaagagtaattattaagatttagatttttttgattataaggtttgggattttaattattagaaataaaggtgtatgagaagtggatggtttagttattatataaatttatagaaaatgaaaatgaagaggtttaaatgaaagtggatatattatgattggaaatattataggatttaattttaagaataagtaataacgtaataggcgtttgaagaataggtaggattttattttgaaaattttattttggaatatttttaggtgtgatagttattttggttagatagttttagtttggttggaatagatggttattgaagattttgtttaattttagttttttaggatttatatatcgtgtattttttaggacggaatatagttttatttaattttttagtttttttttttttgtttttttttattttgtttttttagtatttgtagtttttttttttttttttttttttttttttaattatatatgtagtggttgtttttttggatttagatgtagtttattttaattttattcgatttgagggtagaagatatatttttttaacggagaatgtttttcgaattgggatgtttttatatattaaggataaggggaatttaaaattatttttagtgttttgggtttattataggggagatattattttattataggggagatagatattattgggaggtagaagtaaataatggggatagaagttggattaggaacgagatgagttttgggtgtttgtttagtataatgaagagagagtggtggtttgtagaaagtttagagaagaatttttgtatggtgatatgtgaagaaggaagggttatggtttttattttttgtttagagattttgttaggagtttttttgtttttttagaaggtttttaggatagtaaggttggagacgtgtttttttataacgaggtcgattagttttatatttatttttttattggaattattttttgtgggattttttatttttattttagtttttagagtgttggtatatttgtgattttttgtttagattattatgaaaattgttttgatttttttttagttatttttgtaatttttttaacgagttgtgatagagatgttgtttaggaagttaatgttttattagtataataagtagcgaagtgttggtatttttgttgtttttattggagtattttttaggtatatttattaggaaagttgtttttggatggtgagtaggttagttttattaggtgtgattttattttttgttaaagaggaagaggtagaaagtgaagtgagagaattggaaaatgtttagggagatttttttcggtgttgttattggggaaatatagtttttttgtgggtagtaattattttttataagaaaattttaaataagtttatggattttttatttgtttttatgttgagtgtgtgttgaagtatataattttaaagttatatttatagggaaatttttttttattatttttgttattaaatatggaggaggggaggcgtttgaagggaagtattgtagtagagtgaatttttatttttattattattgttggagatgtataggaatttgtttaagttttttaatagtttagcgtgtttgttttttaggttttagtgtataattaattgttaattttggattttgataagggacggagaaggtttatgaataattgtaaataattggaggaggagtttaagttttttggaaggaaagagtttttttttttaataagtttttattggttagtaagtttagaattgtgttttatgtgagaatgtgaatgaaagaggagttaatgttgtagtttatattttaggagagaaagtagtaaagtagaaataaagaaatatttgtattaagagttattgttaatattaatattttttttttttttgatttgttttgtttattgttgagggttttttttgtttttgttgtatgtaagatttttttagttgtttattattaagttgtttttaaggatatagaatatgagttttttttgttttttgtttgtttgtgtatttttgtttgtttgtttgttttttttttgacggagtttcgttttgttattaggttggagtgttgtggtattatttttgtttattgtaatttgtattttttaggtttaagcgatttttttgttttagttttttgagtagttgggattataggtatgtattattacgtttagttaatttttgtattttttttaatattttaagttttagggtatatgtgtataacgtgtaggtttgttatatatgtatatatgtgttatgttggtttgttgtatttattaatttattatttaaattaggtattttttttaatgttattttttttcgttttttttattttacgatagattttggtgtgtgatgtttttcgttttgtgtttaggtgtttttattgtttaatttttacgtagttataaaaaaggatgagtttatattttttgtagggatatggatgaatttggaaattataatttttgtatttttagtataagagagagggttttatcgtgttggtttagatggtttttatttttttattttgtgatttattcgttttgtttttagaaagtgttgggattataggcgtgagttatcgtatttggtcgagttttttttgttaaatgaattttttttttttgatgatggaagagatttttttagttttttttttatagtatttgtagatttgtaaattataagtgtttttaataatttgttttgtagatgtatttttttggtgaaattttacgttatatattaagtggtaaagatagtattcgaagttaggaagaattaagttagagtttagttttaattttattgattttaaagggaggtttatatattttattaagaaataattaaggtaggatagaggtaaataaatggtgataaaatattaatagttataattaaatggatatggtggatgagaagggatttttggatatgcgagttttaaatatgggggtaataataaaataggaataaatggggtggaattgtggtatagaatacgaaatgtaataggtttagttttagatattttatttttttatatatttaggatatttagtatgaggtttaagaggagtttttattattttttttttagagtttaaatttatattttttttataataagatttttaaatttgttatttttttatttattttaatgggtgtttgtttttttaagtttagagattggggagtagtggttgtaggtggatatggtagaaaacgtgaaggtggatggttgattggatttagagttttagatttgttagggataatagtgtttattttatttttatttgtagttttgagtaaattaataagtagtgtagggtttttaagtagtttattttttttggaaaagtgaatttattatttggttatattaattaattttttattgttggattattttggtatttttatttttagtaaagtttatgaaggtataataagatattttaaaaatagagtgattttattgtaaaaaagaaagatttgagggtaggaattatgttttattaaggattgtatttttaggttttagtatagtatatttaataggtaagatatttaataaatattattttatgagataatttatgtattttataaatgtttattgataattaatgtatgttatttttataggttgtggggttagataagaaggaaaaaaattattgtttttatggaagttaaattgtattgataaaggaggaaaatgttagggagttaataatttagtttttgtggtttttttttgttttttttttgaaattgagatttagttaatttgtatatttattttgagagtggttttattttaatgattatatttagttgtttatatattaggagcggagggaattgtattttgaggtattaattcgattatttatttaatagttatagggatttttagtgattagggtattatttttaacgttattaattttttttttttttgtggtttttttaattggaattggaatttagaaagtatattaattattaatttgggaagttataggaaagtatgttttttaatatatagtgagagaatgtgattgataaaattaatttttttgagattttttttttggaaagtgaatatatgtatttatagggtttttataagtatagattaataagtaaagagttatatttattaggaaggaagatttaaaagtaagtgaaaaataatagttaatttttagatgttgtgtaataaattatttttaattatattaaattaaaatagtgttaaaatatttttaggtaaatttagtatatttattaataaatttaagtttttataaatataaagatagattaatgtaaatgtagaaattatttgttaaattttagagattatataaataaaaggtgaatttaatgtaaaattgtggattttagttgaaaataatgtgttattatttttttatgggttgtaataaatgtgttatattaatgtaagatgttaataatagtagaaataggggggagagaggagggatttaggagttttttggattttttattttattttgttataaatttaaaattgtttttaaaaataatgtttgttaattttttttttaaaaaggaaagaagtattgatatatgttatgatatggaagaattttaaaaatattaggttaagggaaagaagttatatatatatatatatatatagatagtttatggttttatttatataaaatatttagaatagaaaagtttatagggatagaaagtagattatttggggagtagggggtgaaaaatgggtagtaattgtttaatgggtatgaagtttcgtttagggcgatgaaaatattttggaattagaaagtgatgatgatggttatatagtaatgttatatatataatattatagaattgtatattttaaaatggttaaagggttttattttatgttatgtattttattataattgaaaaaaatgtttattaaaattaatgtgtaaatatttgtggaagaataatgtgtagtttttaatatttatgtgtttaaatttatgagtttaaaaatagaaaaaaaaatgatggtttagaagagtaagtttagagtgttgtttatgagtgattcgtatgggatcgcgatgtttttgacgtttgttattttggagagtagtagagcgttattagtaggttttcgtttttttattttataatattttttttaaaagttttgttgatatttttttgttttttatatatagtttatttttttgaatttattataattttaaaatatttttattgtgttatatgtattgtttatatttgtttattttataattattaattttaaattgtgtattttattttgttttaataataaaattgatatgttcgtatagatgatatataatttttcgtttggatcggaaagtttaaaattttttttttgatttaattttttgtattaatttttttaaaaagtttggaggagggattttataatattttataagatttttaagattatattttagtgattagattttttttttttttatgtagttgtatttttttttatttttttttaattgtatatatatattttttatttttttagttttatttatgtggataattaattgttattattttaaataaattgattaggttaggtgtggtggtttatgtttgtaattttagtattttgggaggtcgaggcgagtggattatttgaggttagaagtttgagattagtttggttaataaagtgaaattttatttttattaaaaatataaaaataggttgggtatggtggtatatgtttgtaattttagttatttatgagattgaggtaagagaattgtttgaattcgggaggtagaggttgtagttagttgagattatgttattgtattttagtttgggtgatagagtgagattttgttttagaaaaaaaaaaaaaaaaagaaaagaaaaaaaaaaaaaaagaaattgattaaatttttgattattttttttatttttttttgtaggttaaattgtattttttatgggattttttaagggtttttgattattagatgttagattgtgattgataggtcggattttagagaatttggaataggataggtttttgaaaagattagtttttagtagatttttttgagtagaattaaaatattttgagttagtattttaatgattatggtagttttttttaagtagttagagaaatgagaaatgattaggatttagaatattattttggtttttagaattttagattgttatttttttgatacgttggagatgtttttgtgggtatagaaaaaatgtttagagaatttatattagggaattaaagaatgaagcggggtgtagagttttagagaaggaagttttggggaaggtgtagatagggtatttgttaattatgttataagaggagaggtatttagaggtacggttagggggattttgatttgtttaggggttatttttaaggggatggggtttggaagagaggggatggtttagaatttattttttttgtaatttattgtttaaaatttattgttaggtgatatagagatgattttttttttgtaatatgtgtttggtaattttcgggatttatcgcgttttgtttttagtttttattttttagtattagttttttgataggagttttttttggtttatagagtagatagttagatttttgtgggatatttggttgtttgaatgtttatggattatacgtttgttttgtttagaagaaattagttttaggtgagttgtgtttgaagttaatgttatatttattgtaaagaaagagaatttattttgataattaattaatataattttattttattaatagttaaataggaagataagtgttttacggatataagaaatttaaagtggaagtattttttagagtatataaaatagtttttttaatatatgagaagttattagtaatatagaaattattaataagtaggttattatatttttaaagattataggaaattgtttacgttaataaattttagtgaattttagtttttagttttgaaaataaggatggttgtattatttattttttttttttttttttttaattagattattggggaatgggtagtaggaaattaaattattattttttaattattttgtttttattataagtggaaatattgattttatgtattattgagtttggattgtatgataagttttgggtttttttgttttttatgtttttttagttattggatatttattgattgttttttataggtgatttgtgaaaagggaggttcggggaagtacgtagtacggtttttattgtagtgtgtttcgttgtttttgtttttttgatttatttttttttagtttttttttttgggtaggtttatagttatagtaagaagtaatttttaaataagtagtgttttttataaaaatgttattttggattttaaaatggaaatttaagaattttttgaaattgtgaaattgggataatattaagattgtattttttatttgagtagtttttaggttggagagaagggagagaatttggttttttaggaagtagttggtttgtttttttttgttttggagatgtagaggagagaatgtaagtattttatgtttgttcgttttagaaatgtatatatgtatagataagttttttttttttttttttaattatattatataattattggaatgatttgaggaggaaaggataaaattatttaagtcgtaattatgaagatggtattaataaaaattagtttttaatttagaagaaaattttttatgagggggaaaatataaagttttgtaatttaattgtttttatattagaagaagagaatttaaagagagagagtgaaaatagggttaattacgagaatttagtgtgtatttaatgataaaaataattgtagggcgttagttgagggtgttagagagaaatttagaggagtagaatttttgggtgttttgaaaattagttttgtagaggatagtaggagatttcgttagagagtagtaaataaaaattataaaggaagaagagtaatataatgagtaagtttgagttggtttttatatttattttttaaatttgaaggaatataaggaattattaatttgagagagaaaaagttgcgatttttttttcgtttaaaaaggggatgttgatggaataagtgacgtttatagcggagatgtttgtgatttttagtaatgtttgtacgtggaatagttcgtggttgttttgagttagggtttgggaagatgatggtatcgtttttttttttatgtttttttatggtacgtggggttgtgggaattatttatttgaagagtatatcggttgtatttttttatttttttgtttttttatagtgattagtggggaagaatttagatttggggtagagaaagtaattaaagtttggggtttttttaagtggatgagtgggtagtaattttattgggaggaaagaaggggatgtggagggtttggggaagggagaaaagtttaagggggattgtattttatttagggatgaggttggttggagtatttttttattttgtttgtttgtttatttttattttttgtatttttaaattattttgggatgattaagaggtaaggtaaatgtttaaatttaatatttattttgtttttgagaataaaataatttcggttagggtatgggttatatggataggattaatatacggagtaggaggatatttttaaaaatcgaaattttataaatatttacgtttaatggtagaaaatacgaggtttatgaaattttttaatatgcgtttttatggttaaacgtgtttattaatttagaattaaaattcgtgggagaaatacgtagtatatttaagatttgggtttatatgtatttaatggtatttgttaattttggacgttttaatttttatatatacggatagtgggaaatgatgttgtagggagtgattttatttttttttttttgtttttgttaaaattgttaatatttataattttggtttatatagtggatttagtttagtttttagatgattatagtttttagaattttattgtattttttagaattttaataatatattgtgaaataatgagttttttgtaaaatatgtagtaagatatttagatttttttaaagatatggttaatttttgaagatattggaaaagatataagttatatgtttaaataattaaattttatttatttgagtttgtggattttaagtaattatgatagttttatatattggaggatttgatataaatttgatgatgaataagtattaagaaaattttaaatgttagagaaattgtttaggaattagtatattaaagtggtaggagtaggtattgaatataaaatatttatttagaatttttatttattatttttagatttaaattggttttttggtagatattattttttttaaaaaggtagcggtattgttcgtcgttcgaaggtttggtattgagtatttgtagggttagtttgttttcgttaatggcgttatttattagtatagttttttttttgtattttgttatttgttttttagttatatggtttttatttatatatatatgtatagtagggtaacggtgggatcggttttattttatttttatgttttgtgtattcgttttgggggataggtaataggttagttgtatatttttttttattttgacgaggatgggttgggaaggtttatttatttttaaagaagttgttaaatagagtggataaaatataatgaaagaattaaaatggaattaataatgttatttttaagaatagttttattggagtttagaaattatgagtattttagggttgttgtgaggtttagggttatttttaggtgaggtgggggttttatggatttagaatagaggttgtttttttttaaggaggaattattttatgatgtgtgttagtttgagtaaaatagtaattgaatttttatttgtttttatttgtattttttttagtttatagattaataataaaataattttgtaattaaaatttttagataggttgggtgtggtggtttaagtttataattttagtattttgggaggtcgaagcgggtggattattagaggttaggagtttaagattagtttggttaatatggtgaaatttcgtttttatagaaatataaaaattagtcgggtatgatggtgggtgtttgtaattttagttatttaggaggttgaggtggaagaattgttcgaattcgggaggtagaggttgtagtgagttgagattatgttattgtattttaggttgggtgataaagcgagattttaaaaataaataaataaaaaatatttagaataaagtgaatagtttataaatttggttttagatgtttttgtatttgattttttatgtaataaattgtaatttaatttagtacgttaattattgaaagtttaatttaggttgtagtttgttatataagtatttaggtatagaggtattttggggttaaatttataaattgtttattttattttgagagttttaattgtaaaattattttatgaataagtttaatttaggagttaaggttaatttaggagtatatttttgtaataaatagttgagtagtagttgttgtatttttgttagttgtaggtagttaattgttgaaattttgtttaaatcggtaaacgttaggttgtaattaatagagttgtttttgtattttatttttgttttttgtattttatttttattttttgtttataaatgttgtttgattaaattgttgttttgaattttttgaaatcgttttgattttgagggatggtttgtttatgagttattttttttttagttagattttgttaaatttagtttgtttaaagttttttttttaatattttaattttgtatgattttaaattattttttaatttgttttaaattattttttaatgttttagttttttaaattgtaaatttgttatataattattaaaattataatgttttagagttgaataaaatagtttgtattaagtgtttggaagattttgtagcgtgagtagaggtgtatagatttgtgagatttgaaggcgttggagttatttttattttttgacgtggtaatagggaggggtttaaaaacgtgttttatgtggatttttggtaatgatatttgaagaagtttttttttaggtggattttatagtattttgtaagtttggtttagtcgttatattttatttttttaatgttttatataggtggagttatagatatatattagttgaatgtttttaaataattttgaaaattaaaattaatattttaagattaataattggggaagtcggtaaagtataaattgtgaaataatgatgaatgtaaaaaaggggtttaatttttttattgtgtaaagtggggaaagatgttttttgagggtttttttgggtttaagttatattatattttttatttttattaggttttgttcgtgttattttttttttattttaaattaagtgtcgtttttttttgttaaatgataagaatggttttgtataaggtgtgattatttataatagaaatataagtataaaattgttggttttttgtatagagttattggttaaaggcgttaatattttattatgttattggtcgaaaattgttagttatttttgtagagaggaaagtttttgttaatataatttgaatttttagattattattttttattttaggtaatagttgatttttagttatttttagtattttgtttgttttgttttgtaattttatttaaaataatattattttttttttttatgtatttattaaagtttgaagataagaattagaaaaaatggattagggattagtttggggttgtttttgtatttatatggtttacggtaaattatttaataaaatagattgtttttttattttttttatttatatgaggattttattttttgttcgtgtgtgatttgtgtatatattagattttaaattggtttgttttgtttgatataggtaattaagagttaaaattgattttaatggagattgaaggaagtaaaatgtaagtatggagatttaattaatttgatgtattatagatatagataaaattttttttgtttagaatttaagtaaaattaaagtttaaagtgttaaaaaaattatgtagttttgtttgttaataattgatgttttattagaatataagttttttgggagttattatgtttaatttatttttttttttttttaattttaagtttcggggtatatgtgtaggatgtgtaggtttgttatataggtaaatatgtgttatggtggtttattgtataggttattttattatttaggtgttaagtttagtatttattagttgttttttttgatgtttttttttttttattttttaataggtgtttagtgtgtgttgttttttgttatgtatttatgtgtttttattaattagtttttttttataagtgtgaatatgtagtagttaattttttttttttatacggttttgtatatagttttttagataattttgtgttgaaatatattgttttgttttgttttggttattgtttgtatgttttgaatgttttttgaatatttattgaaaaattaatttttttttggagcgtgaagtatattgaattatatattgattttttgaaatttgataattttattattatattatataatttttttttaattagtatatttaattaatgtattattttattttttaaatatgttaagttatatttaattttttagaattggatattatattagagattaaatttaatttgtttattttaaagatgagaaaaatagagatgaatgagttgataaagttatatataagtaattaaggatttgtattgttaagttagatagatgtagattagaaggtaaatattattatttttttttgatttttggtaaattatgtatgtttttaagattgttttttagttgtaatatgaggataaagtaattaaattttataattattgtaagaaaaaatgaaataatttttataatatatttagtatcgtgtttggtatataattaatatttttaaaaattattatttttataaatgaaaaatattatttgtaagattataagtagtgattttagttttaggatttttatagagagttgggtgttttattattagagtttatttgtaaagttttcgtgtttagagttttttttttttatttgataggaagtaaagggaagttttattttttcgtgttggttaattgtggtttcggaggttattatgatttaggaataataggatatggggtcgtattgtgtgtgttgggtttttagtgggttttagagaatttagaggagtgattttttttttaaaatttttttgagagatagatttgtgttaatttgttttaaatattggttttattttttgattttagaagggtaagatatataggtgtgtgtttttttttagattgtggagttattttgcgttttttagggatttttttttttatgtttatggtttaatggggttgaaggtgttatagtagattttggtagagattgggttgtgtttgttattttgattttttttaaaaatttttttgtgggttgaaaggtgtgtttaagtttatttaaagtatatatatggatatatatttttggagtaggtgatttgatggagagtaaggaattgatggaaagagtatataagggatttacgttttatgtatttaggtagggaggtaggttggttgttttgggttgggagaagaggttataaaaaggagggagttagtaaggaggtaaaggggaaatttaaaggggtttagttatcggttggttatgttttaaattatttattttaggtgtagtaaaataatatttttagtttaatttcgagatttaaaaaataaaaattaggttgggtgtagtggtttatgtttgtaattttagtatttttgggaggttaaggtcggtagattatgaggttaggagatcgagattattttggttaatatggtgaaatttcgtttttattaaaaaaaaaaaaaaaaaattagttgggtgtggtggcgtatgtttgtagttttagttatttaggaggttgaggtaggagaatagtttgaatttaggagatggaggttgtagtgagttaagatggcgttattgtattttagtttgggtaatagagcgagatttcgttttaaaaaaaaaaaaaaaatgttcggcgtggtggtttacgtttgtaattttagtattttgggaggttgaggtggggggattacgagattaggagatcgagattattttggttaatacggtgaaatttcgtttttattaaaaatataaaaaattagtcgggcgtggtggcggttgtttgtagttttagttatttgggaggttgaggtaggagaatggtttgaatttgggaggcggagtttgtagtgagttaagatcgcgttattgtattttagtttgggcgatagagtaagatttcgttttaaaaaaaaaaaaaaaaaaaattgttatatttatagtattttaggttgtatttagaaagtaatagtttttttttaatagtgattagtttaggggtgtattggggtgaggagtaggtgtaggattttatagtagagttgagtagggaggtgttgggtgtaatttaggttgttataatgatgttgtttttgtttatatttgaaatgtttttaaagggtttttaggtttcggttagttgtttgttgttattttttatatattttgaggtagttttttttttttttaatatatagaatagagatgatgttatgttttttataggtgtttatttgatgtttattggaatttttatgagtttttaaagtgttaggtaatatagttgtaatttttttgaatgaggttattattttgttggttttttttggtatttaatgaatataggatttggtaaaatcgtgttttagttttttttttgggttatatggtttcgtggtagtttttttttttttgttggggagggtagaggttttttttataggtgtgtgttagtatttcgtatttatttagtttagtttggagtttttttggaaaaagaataagaataatatattaaggaatttggtgtaagggaaaggagagaaattattttttaaaaaagaaagtaatttatatattatatagggaagtttaatttattaaaaaaatgaaatgtagaaaaatattgatttttttttatagattatttaatgatatagttttttttttttttttttgtataataaaaatgttgttatttttatttttttatgattttgttggttttttttgatatttatagtataaatatttagttattagtatgaaaataatatatgttttttttatagatatatagaaagtataaaattatatggatataaatagtattatttaaattataaagtagagagacgaattatatgtaatatataattagttttatttaaaattaaaatgtaatattaattttaaagtttttttaatttatttatttatatgaataattgtatatttatatttaaatgtggagggtattttgaaagttttagtgtagttataagttatttaaggttagtaatttttatgtgattggaaatgttaatttataggtagatgttatgtttattattgaatagtgtattatgaggattttttttaattattaaaattatttaaaaatatttttttattaatgttataatgtatagtaagataagattttatattgtattgttgtattggggggttggttgtttttgttgttatttataaataaggttataattaatattttattatgtaaatagttgtttatatttttgattatttttatatgatagatttttagaagtaattagtataagatagtataggaaaatattttagttgaagaaatatagttttattttttttataatgtaatgaatatttgtgagtaaaaataattaatgtagaagaaggaaaggtagaatttaaaaataacgtaggcgttataatagttatttaagtaaaatgtagtgcgtatatttttagttataaatgttttatggtttttaatatatattgttatatgatagataatgttttttgataaaaatacgaggtgttatggtgtagtttttgggattttttttgttgatttgagtatgtgggttttagaggtagagtattgatttgggaggttgatgatcgattttttttttttagtgaggacggggttgtggattaagtaggatatagattttgtagaggcgtttttgattattagggtggttttcgtatagaataggttatttttattttggatgcgatgtttagatacggttagtagttttttttttcggatgtttttttaatatatttggggttttgggaattagttttttgtagtgtatataagttggattttattttttttaggtttttttatgtggatgttaggggtagattttagatttgtagagggaagttatagttttgatatttagagtttatagaggtagaaattatagaggttgagattttagtgacgttgtttatagggaggtggtcggagtttaggagtttgaggagtagaaagtcgattttagtttttttatttaaatgtgagtttagatatattttatttgttttttagtttgggtttttatattttagtatttgattagtatttttttttagatttagaaaggggaatcggagaagggggatattatgatattttgtaacgtttttagtattgtaaatagagatgagttgtaatttatttattaatttttttgtgttatgaattttgttttttttattttaaaattatttgtattgggtatattgtttggtattttagatgatgttttgaattttaatttgattgaagatttaatataaagttagaaattattttttaggggtttgttttttttgtattttttgttggtggttgtgattttcggaagtaagtggataaacgggagtatgtgaaatgcgaatttttacgaggcgttatttgtagttaaatattttatttaatgggtaagatggttttgagaaattttagtttataatagtttatgaaattatgaattttttttttttatttaacgtgaaatttttatatttaaattaaggggattatattttttataaatgggaattttgttttaattatttgttggtaaaagagagatttattttttttttttggatttttagaaaatgtgtgatttatttgtaaatgtttttgatattgaaatatattagtacgttttttgtttttttatgttagaaatatatgtatttttttatttattttgaattattttgaatatagtaatagtaatggatgttaagaaaaaaaaaggtattaggaaatagttttttagggaagtaaagaaggaagtagtattagttggagacgttaatatttttagagaattattttttttatttgttttagtaattggatttatttgattttttttttagagtatggagaagttagttttgttagggaattatatgatagtttattttttataagatagatttattttttagttgttttttttttttttatttttttttgtttagttaatataatagtaatatgaagaatttttttatttatagagggtgtgtttaaaagtatttgtgagtttttaatttattgaatattagtatataataatttttaaagtacgatatttttagtttttttagttttgttgatagttttttaattgagggtattttataaggaaagaatatttttacgttttagtttttgtatagatgggattgggtagagaaaaattaatgttttgagatatagatgtcggacgttagttgggtttatttatgtagtaattggtttgtttttgcgtattagttttaggtagtataaatgtgtgttttagtaaaattgttaaagattgtatgttatggattttaaataatttttaagaatagttaaaattgtgtaaattaaatttgggaaaatattttaatattaagtttgaagattttagaattatttatttttaaattaattagggtagaggattaagtattaggaattattttgatgatttaaaaggatttttttaattgttataaagtttattataaattaatatatttttgttttttgagattttgtgtttttttttagatatttatttgttattttgagtagtaagtttgtttttttatagtagtttttattttggaaatggtattagtattgtttattgtcggagggttggatgttgtgtatttttagtgttatatttttttttgtaatgttattttttatttattttatttagtttttgtatttttttatttgtattttagttatttttattttatttttgtgtataaatataggtgtgttgggttttgagcggtattattttatttttacgtgtattgtggtttttttggggagtagttggtaggttaatagggtattttttttaatttcggttaggataggatgagtagggttaatgattttaaagttttttataaaataagtgaaaaagaggaacgaggaaatgttaattagaaaattatatgtatgttttggggtgtttagtttgttaaaatggaggtaattagaagagggagagatatatgtttaatgttttagagaaatttagtatgatgatttgtatatttgtttgttatagagttaattttgtgtattgaaaataaatgtagtttaaaaatgtgggtgaggttgttgtttgttatttattagttatgtgattcggtggtaaatttattatttttggtaagattttgagatttgaagttttaatttttttatttttaagatattaatattagtatatttgggttgtttttatttttaagtaaattatttattttttgagttatttatttttatgtaaattgattttttaaattggaaattttatttttgttattaatattttatttttttgaagtttagataataaatttatttattagttttttttagttttttaggatttttttttttttagatataaaaattgtttttttttttgttttttttttgtttgtttttttttcgtttggagttggtaggaggttaattattgggattatgtataatgtagtttttataaggatattttgtgttggattaaggatattggtttgtttagagatttttgggttttttaaataaattttaagatatgtttgattttttttttgttatttgtaaattgaagagatgtttaatagttatgtatgttattatgtttgattattttatgttatgtatgatatgtttttttttattttaaatgtttcggggttatttgttttttttttgtgtagatttaattttgttaggaagaattttattttatttagttgttgttgggtattaaatagatgttgtttaaaaggtggttaaagagtttaagtggagatttgtttgtattttttattgatgaagtttaaatatgaagttagaattgaagatattttattagattgattgttatagggtagggagttgtagtataagtatagagaagttagtagttttattatattatattagttttgtagcgttaaggtagatatattagttttgcggtatcgaggtagatatattagttttgcggtgtcgaggtagagtttgcgttttttgatgttttgtgtcgtgtttttttttatttcgttatgttgtattttttttagggttttgatatttttttttgatattgattttttttttttgatattgaatttttaaataattattttttaaggtgtaatattttgacgttaaaatttagttagtgagatttttaaagttttttttttttaattttttatttttaagtattttttttaattgtagtttaatttatgataagaagtagttgtattttttgattttaaagtattagagtgaattaataatttaacgtggtgtaattattgatttaagtgtttttaatgttttatttaattttaaagtttgtgttggtttttgagatgtagttattgttgttatttttattaaaaaggtgaaagaattaaggtatgaggtgtttaagtaattttttaaaggtgatttagttaggagtggaggagtttttgggagtggaggagttttttaaaagtgaggagtttttttttggatataggtggtttggttttagatttatatttttagatgttgttttcgatttttggatttagattagtttattgggatattagattatatagtaaagggagaagggaattttatttgattgttttattgttagtaggatgaataggaaggaggcgattgtattagatagattgtagtttggaaaatttattattttttttggaataaagataaggaaacgttgtgtttaagtgaggttgtgatatattcggtatattttatggtttttattggttatgtagttttagtagagaatttatattaatttttgtatagttagtgaaatgggtttggttttatttttttgtaattattgattatatttaattttttatttaacgtgttatattgtgagataatgtagtaaatgtaagaagttttgtttgtttatttcggtttgttagtatatttttataaagtttttgttgtgatgatttgtagttttttagaaagatgttttaaagataaaataagattgagtatacggttttttattttttttgtttgagttattttattttttaaaagataagtaataatagtttttgtttttttttatatataagataacgtttgattgaaggatatttttgtaatttataattagatttgtttatatatttaaacgttgatgtagttcggttttaatgtagtttttgagttaatttgatgtagtggttaatatgtaattttttgatatcgaaaaggatatggatttgtttttgaattataaagttttattgattgttttgtgtatgaaatattttagtttatatattgttatttgtgtttaatgattgtaatttttgtattgtattttttagtgaaaaaagataattttaatatgaagagtttttttttttttgtttgaatttttttataaaagttttttaatttgtaatagattttggattatttttaatttcgttggtgtgtttttttatattagttttgatatttgttttttaatagaattttatgaaattatttttgttttagtaattttaattttatgagataatattttaagtaattttttaggtgtaaggtagttttgtgattgaaatgaaaaaatatttgaggtaaaggaataataatattaaaaaaattttaaattaaattaaagtaaataaaattttttaggtttatttgttgtgagtttgtaaaatttatagagtaagatttaaatatttttttttgttttttttttaattttttttgtaaagtttttttttattattgttttttatatatggaggaaagggtaggaaggttttgcgtttttatattgtagttagaaagttaatatttagtgttagcgtttagagaattcgggatatagagatgtcgtggaaagtgaaagaaagagtagtagaaagatagtcgggaaaatatttgtaagtggttttttagaatagatttaaaaatacgaatgaattaaaaaaataaaaagtttaattggtagaaattggtaaatttagtaattttattgttttagttgaataaaaatattttatatagttaaaaattttaaaatttattaggataaggatagaaggttagttttattattgaaaaatataaattttagagtgaaagaagtttaagatttattatatgtgatgtgttaagtattttattgaaagaaaatttgttttatataaagtagagaaattagtttaggagtaatgttaagttaattatagtttttttttttttaagaaattattgttagtaagattttatgggataggggtaaaaattaatattttgaaatggagatttaataattaaatgagttaggagattgttgttatataaatattgtttatttgttttataaaaaatatgtatttttatataagatatttttaaggaaatttatatgagtttatttataatatttagatcgaaaagggtagtatgatatttatgtgaaaatggggttgggtgttagaagatagtgtagattatgagtattttgttatttgaaatttattagttatttttttttagattgaagggtgttgttgatgtttttttgattttttttgtgaaaagtaggaatatttttttttattaagtaagagtaaagaaagttttataatatttatattaagtatgattttttagttttgtgaattaaaatgaatttatatttgttatagattattttagaggtttgcgtttttgtaggttttttatgttaaagcggtgggagggaaaatttataagtgaatttttaaaaaaattgtttaaattaatgaagttttcgaagaatgttgggagaatttatttttagtgtttagatagattgtgagagaatatattagggaggataattattttggattagggtttttaatgggtaaagaggttgttttgtttttagaggatatttggtaatgtttgggaatatttttagttgttacgattgggggaggggatatatattgagtagaaattaggggtgttgttaaatattttatgaggtacgtggtagtttttataataaagagttatttagtttagaaggtcggtggtgtcgaggaaatgttttgttatagggtttgttgttaggatgttgaaaagttttggtatattttttgaaaatagataattagatttaaattgttatttttaagtaaaaattttttaaaatgataagtttttgattttttcgttttattatttggatgtaatgtaagaattttttgaaattgttgtttttattaaatatagtaaattttggtgttgttaagatatatgatttaatatgtaaatgtattattaaatttttaaaaatttatgtttaatttaatttaattttttggataaagtttaagtgttaaattgtaataataagtggtagtttatgtttaggtattagatgatgaataattttgaattttaaggtttattttgtattgttaaaatttatattaaagaaaattgtaaattattacgtattatgggttattagaattttttttagtaaaagttttaaatgttgttttttaaaatgttaagtagttatagtaattgattggtaagaataaattaatttagtttaggaagttgaaagtttatgtattttagtttacgaagttgaaagtttatgtatttatgtagatattaaaaatagttatagtttgttttttttttgtaaatttgtttgagtttattgtagattttggatattagttttttgttagatgagtaggttgcgaaaatttttttttatgttgtaggttgtttgtttattttgatggtagttttttttgttgtgtagaagttttttagtttaattagattttatttgttaattttgttttttgttgttattgtttttggtgttttggatatgaagtttttgtttacgtttatgttttgaatggtaatgtttaggtttttttttagggtttttatggttttaggtttaacgtttaaatttttaatttattttgaattgatttttgtataaggtgtaaggaagggatagattggattaagaaaatgtggtatatatatattatggaatattatgtagttataaaaaatgatgagtttatattttttgtagggatatggatgaaattggaaattattatttttagtaaattatcgtaagaataaaaaattaaatatcgtatatttttatttataggtgggaattgaataatgagattatatggatataggaaggggaatattatattttggggattgtggtggggtcgggggaggggggaaggatagtattgggagatatatttaatgttagatgatatattagtgggtgtagcgtattagtatggtatatgtatatatatgtaattaatttgtataatgtgtatatgtattttaaaatttagagtataataaaaaaaaaaattaaaaaaaaaaaaatagttatagtttattatatgttaaaataatatatttttatagagaaagttaaaataagatttttaggagataaagtgaattgggtttttgtgtgtgtgtgtgtgattttggatatttttttttatttttttgagtttgtattttttttgttgtgtggtggagataattattttaatgttttttaagttgtgttatgattatgtgatataagaagacgttaaggtttagggatatatgttttatattatttatgataaatgaaaatgtgattttggtttttttgtttttaatttcgtgttttttttttatttagtttgttttataagaatattgtgagggttaaatgggttataatcgtattttgaagattgcgtagtgggatataaatgtaagtgggaggtagtgtaataggtggtagtatttttttaaaggatattgattttgttcgtatgttttattttgtaatttgagataatgtttttagtttttcgtggttattttttattagggaatttaaattatttacgtgttttttttttttttttggggcgaaatttggtgttattgggtttttttatttagttttagatgtatttttatttatatagtaggtggttagaaataggttagagttttggggtgtgttgattaaagatagaattgtgggagagttagagagtgtggaggttttttttaggattttgggtgaaggaggatttaagttattttattttagttgaaggtagagttaaatttcggaggttttgtgaaaatgagattgtattttgaaaattagaatagtatatttattttttaatagttataatttttttaatagtgaaatttcggggataagtggattttggttgggtttagttgtgaattttgtagacgtgtatataaaattatgatattggtaatttttattttttttagaaagttaaggtttttatggaggttttatttgtaattttttagttaggtttttatatagattttatcgttttatatattagcgggtgttatttatttttttttttattttgttatatattaaagatttttaattagtgttaagtttttattagagtatggtatttatcgggttggagttggaagtaaaattgaatattaaacgtgttattttttattttattgatgagaaaatagagatttagagaaaggaattgttttttttaggattagagttttgggttaaggttttttgtgggttattttattgttttttttatttaggtattttatttttttttgttgagtaataaaaggtttaattatttttagatgtttattaaagaaatgtaataatttttttagtataatatttgggtatgaagagtataatgataggtatattttgtgtgtgtttttgtttttgttagatttttttttacgttttttttaagtttgtgttttttgagttagagggggttttagatatagttttaggattttaagagttttttagaataatttttaatttaattgtagatttttatgttaatgtaatgataaaagtatatgtagcgttatgatgttataaggtttgagtcgattttttttttaagttttttttttttttattatgagtagtttataattgggttttttgatttacggttacgatttttaatgtaagggtttttttttttattttttagtttagataaagattttttttttattgtagaggatgagagatttggagagaagagaaataattaaatatggacgaggataggagggtttttttattttggtttttttttaattggagtagaggggaatgaattttattttattttcggtttttagaatggtagcgatgtttatagatgttttttttagagtggtagtaaaggaaaagttttttaaggtaagaagtggtagattttggaaggttttaatagtgggatgaaagtttgttgtttaaaatgttgggatggaatgttttagtaagaggagagtggtattaaggatataatagtgatcgttattattgtgggaaggatagtgacgattaggaaatacgacgggatagtgatatattgtgggagttgatgatgtaaatgtgaggagagatttttatattagttttgtttcgttttttattttagaatttagaaattatacggtaggtgaaggagacgttgttattaaattaattgtgtgaaagtttttgaatttatttggaaattattagatgaatttttttgttagaagatataataatgtttggtatataaattaaaattcgtaataggaaaatatagaaatttattttatatatttgaatgtgtgaaaagatgtcgtttattgtatgtattttgtagtattatttttatggtattaaatgttgtaattatttgaattttttatggttagttatattagcgttaatttatcgcgtaaagaagtttcgtttatattcgcgtgtgtgtgtttttataaattatttgtatatatttttttagaggtttgtttgtgttgagaattgtgttttaaattatgttatatattatgggaggttattttgtgtaggaagatgttggtgtgtgggagagaaaaaaaggagttataatttttgtattttgattatagtttatttttaggagaagcgggaaaataaggtataagttgttagaattgaggagagggaaaaataagtattcggcgagggtaggaggaataggagaggggagttatggatttgtttggttattagagggtagtagagacgggtttattgtcggttttaaggatgtttcgtaagtcgatttatttatagatttttttttaaatgcggcggttatttgtgatttatatttataatttttttagttattagacgataaaagaagttttgagtttaggttgattgagatttttattttagttttgttatatatttgggtaagttttattttgggtaagtttgttttttttaggggttttaatttttttagtttttatatagggatagtatgtgggtggtttatattaaagtatcgttgtaaggataaagtaagaatataattatgatataaaatttttttatagttattaggtgttattattgggaatggaaggttttggaaagaaggtggatagaaaaatagaggagattagaaatgaagataagaaattaaggttaatttaagaaatgttaggagtgttgttatgaatatggagaagtttaggcgacgttattagttgttttttggggatttggttgaaagatgttttgagagtttttagattaatttattagaaagatgattattttgtggagttttttagtagtgagatttatataggtatcgtttttttagggaaaggaaagaaaaattagtagtttttattttttggaggtatagtggtttgttttttatagttttttcggtttgttgattgattggaggagagagagtatttgtagaagttttgcgattttttttttagatgtgagtggggggtttgggattttcgaggttagtgaggggagggtggtgtttataggacggaggtttttttttatagcgtggttacggtttaatttgtatttttggttattttttttgattggtaaaaagaaggaaagaaggaaagaagaaaggaagaaagggaggaagggagggaggggggaggaaggagggagggaaagaaaagaaaagaaaaaagaagaaaaaaagaaaagagaagaaaggaggaagggtaggtagtagaatttttgaataggaaaatgtttaaatatttagggatggaggattgaggtatttttagttttggttgatttatagtttaagttgagttttttatatatatggttgttatatattttataaaaagtgtttgataaattagtttttttaaaatttttaattttaaaaaatttaggttgggtgtggtggtttatatttgtaattttagtagtttgggaggtcgaggtatgtgaattattcgaggttaggagtttgagattagtttgggtaatatggtgaaatttcgtttttattaaaaatataaaaattagttgggcgtggtggtgtacgtttgtaattttagttatttcggaggttaaggtaggagaattatttgaatttgggaggcggaggttgtagtgagttgaaattgcgttattgtattttagtttgggtaatagagtgagattttgttttaaaaaataaataaataaaataaaataaaataaatttttatttttaaatttatttttatgaaagagttatagaagtttaagataattataatgattatttattattttttgaaaatgatgaaattatttaaaattgattttattgtaggtgggagtttataagattaaagtttttaggaagagatgtaagtttcggtgaagtttattttagttgattttaaaattaatgtagatgtttttttggggaattgcggggagagggtgtatagaatgtgttaatattattatattttttttaggattttaaagaagttgtatttatagagatattcgggtatgttttatattggaaatagggtatttttttaaatatcgggagaaagaaggtaaagaaaagtatatcgatttattaagttttttgtatttgtatttatttagtttgttatttattttgggtgtttttatttggtttttttggggtttttgagaggttttttatttttgcgaagtatattttttatcgggttgttgtagttttatatatggttagtagatgatagttttgtttaagaatcgtttttaagattttacgattgtatcgcgattttagagtggcgggaaggattgagagttttattaagaaattttttaaattttaattgttaatatttttttttttaaaattgtgtttttgtatttcgtggtaaatttagtttaaagtcgcggatgggggtaggaataggaaaattgttgttgttgttgaatatgttttttttttttaaacgttttagtagaattttgttattgaattattttgggagaatgcgggggaaagagaggaggagagaaggatagagagagagagagagttagagaggatatgagggagatagggagagaggattgttttattgttttaaattcgttgtaattacgtcgtaatattaggtatttatttttaaggtagtaaagtagaaaatattataaatttagttattaatgttatttttatttttgagagtagagaatataggtattaatattataataatttaataattatgaaggaattaagataatttttagggaggatgtggtgtatggaatggaatgtaaggaatcgtttatattttatgtaggtttagtattttttgattataagttaaataaggggtggattatttatgagtttttcgggaaggtggtgggtaatttttggattaagggttttttttttttttagattatatagggtaattttggatgttgttatggtatttgtaaattgttatggcgttggtgggagtgttttttagtatgttaatattttataattagtatataatgagtagtgaggatgattagaggttatttttgtggttatgttggttttggtgggttttggttcgttttttaattgtaatttgttttattagtaaggtttttatgatttgtattttgtgtagattttttattttattttgtgattgaaaatgttttaattttttgggaatgtagtttagtagtttttagttttattgtatttagtttttatttaagatggagttgtttcggtttaaatatttttgatatttgtggatacgtagaaaaggataattaatgggttagtaggatgaaaggaaaattatattttaaaggatagtttagttattgaaattgatatgaattggaatatgaaaataattggggataatttagttttatgattatatataaaatatttaattatgtttggttgtattttaatataaaattgggtatgggaaattatttttaaaatattttttattttttaaattgatttggtttttttttttaatttttattattttaaaaattagtttaagtttagtagattttatataattttagattttttttggtaaatagtaaatattatagtttggaaagtttgattgtttatatataaaattttaagagagttattgaaaatgtttagaatgtgtgaatttaataatggtaaaatataaaaataaattgtaattttatatattatagtagaatattatatataaaatttaaaaattattttattatgatagtaataaaaatataaaatatttagatataaattgaatcgaaagatgtgtgatgtgaaattataaaatattgatgagagaaattgataaaattttaaatgtgtaaagagatataatatattttgatttgggaagaattgatatttttgaaataatagtttttaatataattttgattaatatttttattgggtttttttgtggtaatagataattttaaaatttatatgaaaatataaaggatttataatagttaaaatttatttgaaaaaggatagaagaaatatgtaaagtttggttttaagttatgttttaaagttatgggtaatatgttaaggttagtaatgtaagttagagaaattttaataaagaattgtgtttagttgtgggaatttatgggagattttggaatgaagatgtataggaaataaatgtaagagatgagttttgggtttttagttatttagaggttgggaagatgggagatttggtaaggtaggttgagatttggttgttattttcgtgtgatgagaattttaggatagtgaggtttagtaataagttaagaaaatatattaatgatgtagtagtggttaattatataaaatgtttttgatatgatgaataaaatgatattttagaaatgattattggatttggtaatatggagttaaaatatgttagtgataaggagtttagttaaagatgtggattgtagtttggtttgtgaagagtggaagaagaatggggaggaatggaaataataggtgtagtttaatatttttaagagttttttttagattagaagtaaaaatttattagtagagttggatttagggaaaaggaaatgtagtggtatgtttatatgttgattggaattatttattagagagaggaaatttttttggtaaattggataaagatatttataatatattaaattatgaaaaggattagtatttagaatatagaaaggttttttataaattaattagtaaaggattatatttttttgagaaaaaaaatggtaaaggtaagaagaaatattttatagtaatatgtataaatgatatgtgaatatgtgaaaaaattttaaattttttattataagttagagaaatgtaaataaatgttatattgaaaaaataataaaaatattaaaatttagtaaggatgtgggttaatgtttttattaatagatttttgaaggaaatagaaattgttaggattattttggaaaataagttagtataatatagtaaggttgaaaatatatatatattattatattatattattattataatgttattttagaatatatattaagaattattgtaagtttattataattttatttttaatagtaaaatattaaaataatttaagtatttattaataattgaataattttatatatttttatattaattatagttatttatattatatggttatttatagttaaatttataaatggaaatagttttttttttttgagacggagttttgttttgttgtttaggttggagtgtagtggcgtgatttcggtttattgtaagtttcgtttttcgggtttatattatttttttgttttagtttttttagtagttgggattataggcgttcgttattacgttcggttaattttttgtatttttagtagagacgaggttttattatgttagttagggtggtttcgattttttgattacgtgattttttcgttttggttttttaaagtgttgggattataggcgtgagttatcgcgttcggttagaaatagtttttttagggttggtaaaatggtttttatttagatttttttatgtttgtttgtgaattggtttttttttcgatgagttggtgtattattattatgagttttgtgtaatattgagtttttgtttggtaagttttgtagaattttttttttgggttttgtatgttgaaaatatggttttattgggtattggtaaattaaacggagaggaggtagtgcggtaagtataaagattatagttataatattttaaattaaaaatatttgagatagattttaattaatttagaagtttattttgttagggtttaagataatgtttagaagataagtttgtggttttttttaaagatgatttagaagtttttaatatttaaaggtgaaaagtagattggagggagaattgaatagttttaatagtgtattttttttggtaatttttatttttttttggattattatataggttgaaattttgatatatgttaaggttgtaaattaaaaagtatttgagataggttttaagtaatttagaagtttatttttttaaggttagggatatgtaggaaagaaaaaattattaaatgatataggtaatttggtttgtgtttttttttaaagatgattttaatatttaaaggggaaaagtgggttgatagggaaagagagaaggtatggtaatttatatgttgtaaggaaaaaggggtaggtaggggaaaagttagttatgtatttattttgtttttagtaaattatcgttttgtatatgattaggtgaatatagagtagttatcggtggggatatttttaattttttatttgtagttatttgtttggaaattaaaggaaaggtaattttttgcgtgatttagtttttattttaattttttttttttgatatggtgaattggggtgttaaatttttagtttttttttataatttatataaaatataatttaatagatatttttatattttagtgtatgtggcggttttggattttatttttgtttatttggatttgattgatttgatatcggtagtttggaaattatttaggtagattgtggggagggaaacgttttagttaattatgagtaagtaaaatataattttatatttattattatttagttttaaattatttaatatttagataattttttagagtaagggaataagataatggttataattaagtaggaaagaattacgtatatagacgatttttatttttaaagattagaagatgtaaatgtaaagagaaaaagtgttttttacgatgttagttttagtttgataagaatatatgttatttattatgtgagggggaaatatgtttaatatagttagttgttttagtttttatgtggtgtttgatatttgtgtttttttttatttggtttaatttttattaagtataaaaattttataaaatgtttaaagggttagagggataaatttggattttatgttttataaataaaggaaggattttataagataaaaatacgttttttatagaaattttggaagtttaatatgtggaataaggtgaaatagaaatagattattttttataggaattgaattttgagttttaattaattaattttagattagatttgggtgatttgagatattaatgattttagttttatagttttattgtttgatataagtaaaattaaataatttttagagaaatataatattttttggagttttaaattattatttatattttttttttgtatggtattaattaaaaaatatataagaaaataaaaaataataaaatttaagaaaaatataatagaatataaatatacgattttgatttttttgtgggatattgttagattaatttaatatttttagtatattagttagaaaagttaaaaatttaaaatataaaattcgtattttaaaggaaaaggagagttgtggaagtaatatgtattagatgaaatataattgtagagaataggtgatttttttgaggtgagttgataattatagttttttttttgttatttatggggtatttgttaatttattgtttatatagaagaggtgttatgggtttaggagggaatttgttggagaaagggaaattaagtaagggatatagggatagattaagaaattagatatttgaggtttttaaatttttaaatttatggcgtgatttttttataagatattttttgagttgtggtgtagtattgagttatgagttaggttttaaattttaaaggtagaatgaggatttttttatgttgtttgtgtttaggatacggagaattgtttttagtttgggtttgtcgagtataaggtgggttttttcgtttttatatgtgtttgtttttgaagttatttgagaaggaggttagggagttgggttagtaagtattgaagtttagggttgaattttttattgatatttgtaggaatagagatttatttgggttttaattaaaagttttggaaggagagttatggtttttggtattgacggagtagtttgtattgaaataatttttttgttggtaataatgataaattttggattatttttattttttaatttattttattgtgttgtgataagaatattttatatgaaatatattttttttataagtttttaattataatatagtattgttaattataggtataatgttgtatagtagatttttagaatttatttattttgtataattaaaatgttatattggttgaatagtaatttttttatttattttgtttttagtttttggtaattattaatttattttttgtttttatgagattggttatttaggtattttatataagtgggattgaagtagtttcgtttgtttggggtgatttgaggtttgttgtttcgtggttatagagattaaggatgtagatatataaaaagtgaggttaagagtggaaatttaaagaatgtttttatttttgttttcgttttgttatttatttagtagttatttaggagtaggttgtttagtttgtatgtagttgtgtggttttgagtgatttttataattttgagttttaatttgattgtattgtggtttgagaaattgttatgatttttatttttttgtatttgttgaggagtgttttatttttaattatgtggttaattttagaataagtgcgatgtggtgttgagaagtatgtatattttgttgatttggggtggagagttttgtagatgtttattaggtttgtttggtttagagttaagtttaagttttgaatatttttgttaattttttgttttgttgatttgtttaatattgatagtggagtgttgaagttttttattattattatgtgggagtttaagtttttttgtagatttttaagaatttgttttatgaatttgggtgtttttgtattgggtgtatatatatttaggatagttagttttttttgttgaattaatttttttattattgtgtaatgtttttttttgttttttttgatttttgttggtttaaagtttgttttattagaggtgtttatagtattttttgatggtagtttgtatttttgtgggattagtggtgatattttttttattatttttattgtatttatttgattttttttttattttttttttattagtttggttagcggtttatttattgatttttttttataaaaaaaaaaaaaaaaaaaattagtttttggatttattgattttttgaagggttttttatgtttttattttttttagttatgttttgattttagttattttttgttttttgttagtttttgaatttgtttgtttttttttagtttttttaattgtgatgttaggatgttgattttagattttttttgtttttttttgtgggtatttagtgttataaatttttttttatatattgttttaaatgtgttttagaaattttggtatgttgtgtttttgtttttattgtttgaaaggaatttaatttataaggaggttaagttaatgttagtttttaaggtttttaagtatagataatggttttgtttgagggtaatgttgtaggttataaattaaagttttttgtgatttagtaaggtgaaaattttaggatttttttttaagaatataaaaagaggttagatacggtggtttacgtttgtaattttagtattttgggaggtcgaggtgggcggattacgaggttaggagattaagattattttggttaatatagtgaaattttgtttttattaaaaatataaaaagttagtcgggtgtggtggtgggtatttgtagttttagttatttaggaggttgaggtaggagaatggtgtgaatttgggaggtggagtttgtagtgagtcgagattatgttattgtattttagtttggaagatagagttagattttataaaaaaaaaaaaaaaaaaaatatatatatatatatatatatatatatatatatatatatatatatatataaagtatattttgttagtatattataggtgtaataaaatattatggatgatttatttttttttttatgattatattttaaattgttatgttagagaaatagagaggtattgtttgaaaaatattattttttaagattttgtttatggttatttgtttttttgtatatttttttgttattaatgatttttattttaatatcgaagtggtgtttttttttttttaatttaattaatggattaaggaattatagtagtttttaaggtttattatttgaagagggtttttgtttatgttattatggtaatttaggaagatattgagaagatagtaatgtaattttggaaggataataatagttatggttatattaagaattttgtttgggatggggatgatgttatcgaggagtgtgtgaatggtatttggaagaagatatttaggaggtttgtttgtgagtttaaagggtttgttaaggatgaggagattgtaaaaatttataaggttttggttgagatggtaaataattttaaattgagtacggatgaggatggtattaggagtttttagaggtagttttttggaattgattaatgaggagttgttggaattgagataggaatgtatagttgaagtagtggttagaaaaaaaggaaattgaaggagaagaagaagaagaattttaaataaaattttttgtgtagggtttagtaggagtttttgtagattttaataagttttttaaaaatttgaaaatatgaattttagtataataaggtttttattaataaagaggaatgtttacggtgaattatttgtttataagtaaatttatgatgaaaaaaggaaattaagtaaattattatggatttgtttttgaagagtgatatttttttaagaagagttttaagtaggttttttaggaggaattttagaagaaagtgtagttattataggagatggtttttttatgtgtgttatggtttttgaagatattttggtaggataagatgtggaagtgggaaatagtgatattgatgattttgattttgagtaggtttaggttaatgtgtgtgttttttagattttttttttaagtttaaaaagtaaaaaaaaaaaaaaaaaaaaaaaaaattaagtagaaaaaagtttatagtataaggatataaagaaaatatttttgtatagtgtttgtgttttaagttgtgttattataaaatagttaaaaagttaaaaaattaagtatataaagtttaaaaagttagagtaagttaaggttaattattgtagaaaaatattttttataaatttaatgttgttttagttatagtatttataaagtttatagtaatgtatagtaatgttttaggttttcgtatttatttattatttatttattgatttattagggtaatttttagttttgtaagttttatttatggtaagtgttttagaaagatttattatttaaaaattttttatatggtatttttattatattttttgtatgtttagatatataaatagttagtattgtgttataattattaatagtatttaatatagttatatgttgtataggtttgtcgtttaggggtaatagggtgtattatatagtttaaatgtatagtaggttataatatttagtttgcgtaaggatattttgtgatgtttatataaagatgaaattatttaatgatatattttttagagtttgtttttttagttaagtgatgtatgattttagttttgttttatttttagagtatagtttttaatgatttttaatgaaaaattcgatagtttttatttttttaattttgaagagttgaaggagatttaggttgaatttaaagaaatttttagtttagtttattagttttttattttatatatttttaatatttaataagtgttttgaaaaagatatttataaagtgtttgaagttattaatttttaaattttgttattgtagtattacgttaaatgataaaatatttgttatttttttagtttattggaggagtttattgttagaggttaaatttggattattagttttaaataagtatttagattagtaagtgtttttaggtgataagtggttgttgttatttggtattaatttattagtttttttgaaatttacgtttgttttgttttagggtttttattaatggtaggtttttgtttttttaatattattggatagtgaaagattttgtattgttttttagaagttgatattttagttttttgttttattttttatcgtagtattagaagttaattaacgtgttttgaagaaattagagtgtttgagatgttttagttttttagttatattatattggttttataattgttgttgattttttttttatagtagaaaattgtaggaaaattgtagtagaaaatttttttatagtagaaaacggtagtagaaaaatggtattaaaacgtagcgtatatttgtaaatagtaaatgttattaagagaaatagtgatgtttaaacgttagtttatatttgtatggtttttttttggaatttttatttatttagttttatttatttttttagttaaataatgttttttaaaaatatatttttaaaattttattttatttttgtagttgttgttagtgggataatttgttttattgtgattttaatgtattttatattgtggtggaaaaaagaataagattttaaattgtgttttttgaaaaattggatatagaaatagataatggttagattatatataaaaataggtttggttgggtacggtggtttacgtttgtaattttagtattttgggaggttaaggcggatggattatgaggttaagagatcgagattattttggttaatatggtgaaatttttgtttttattaaaaatataaatttagttgggtatggtggcgcgtagttgtagttttagttattcgggaggttgaggtaggaaaattatttgagtttaggaggtggaggttgtagtgagttgagatcgtgttattgtattttagtttggcgatagagtaagattttatttaagaaaaaaaaaaaaaaaatagatttttgatttatagtttatagtagtttgtttggggaattaatttttttatttttaataaataatttagtaaggtagtttgtttaagttcgatttgtaggaagttagattgttgtttttagtaataatttaggaggttaaataataatttttataataattgttttaaaatggttaggatttgattaataattgatagtttttttaatatttgtgtttgtttttaatttaggattaattagggaaagttaaatatgtattttatttaattatataggatattttatttttagttattttttaagtattttttatgttaatagtttttaattaggttttttttaattattataaagttttttatttttttgtttgtttttgagtttttgttaaaatgtaaaagatggtggttgatttttttgttatagtaatttgtgaataatttttgttttttttatttggttgatttttatgtatttttatattattaagttttatataaattaaaatttaagaggttaatatttaattaatgatatttaagattttttatatcggataatgttatatattatattaggtttaatatttttattaaatatagatttagtaaattattaaaaatgttaaaaatttattaaatatatatgtaagtataaataaggaaaatgtaaagagagatattagaaaggggtaatatatttaggaataaatatttaagatattttaagttggagatattgtttgttggtattaaattaatttttttttgttttgtgtttttttttatattatttggggttgaagtttggatattattttttttagagttttttttttaggaaggtatttatttgcgattagaaggtagtggaaaattgttgttattttgtttttgatagtaagtagtagtagttgttaggagtgtgggtttgtttagtgttgtagggttaatagtagttttttgtagtttttgatttttggaagtataattttgttttttttgtttttataaaatttttgtaatgtattttattgtattatatttttttgggtttaaaatattttgagtgtgtttttttttttttgtaaatttgggttagattgaataattttgtaagtatgtaaatataagtaattattttaaaataatttgggtttttaaatgtaatatagatgttttttaatttatgatggggttaatttttaataaatttagtgtaaattgaaaatattgtgagttgaaagtgtagagtataagttgtttatttttatgattatgtggttgaggttgtttggtattgtgaaagagtattttattgagtatcgttggtttggaataagattaaaatttaaagtatggtttatatagaatggatattgtttttatattattgaaaagttaaaaatttttaagttaaattattttaagttaggtgtgtttgtagttttaaaaaaattataaataaagaatatttagtgttgttgggagtgtagagaagatttataaggtaaatattgatttgtttaaagtttgagagaaaaaattagataatatgttttatgatttttaaatgttaattttaaagtaattatatatttataggagttgatgaaaatagtatagagaggttttttgtattttttatttagttttttttaatggttatattatatataattatagtataatatcgaaataaggaaatcgatattgatataatgtatttgtagttttttattttattatatgtgtagatttatgtaattattattgtgattaaaatatagaattatattttattattataaagattttttttatgttattcgttttttttaagagttatattatttttttatttttattatttttatattgtgttaattattaatttgatttttatttgtataattttattatttagaaaatgttatataaatggaattatattatatgtgatttttcgagattggtattttgtatttagaataatgtttttgggatttgtattaggtgttttagagcggttgtattaataggatatgtatatatagaaagatattttttttaaagaatttgtttatatgattgtggaagtttattgagtttaaattttgatggaagaggttagtagtggaggagattgggatagagttgtagtttgagtttaaaggtagtttgttgtggaattaggaagagttaggattgtagatggagtttgaggtaatttgttggagagtttttttttatgttagttaggtatttaattgattaaatgaggggaatttagttatggagggtaatgtattttatttaaaatttattgatttaaatatgtaatttttattttaaaattgttagattatgtgaaattttatgttttttatttggttttattgatatttagatggagtagattaaataatagatatttattgaaagtttttatttaatattattaataggtttttagaagttgtgattttaagtaaaatgatatataataaaattaatttgattataggttaatttagcgatttttaatatttttggtattagggattggttttgtggaagaaaattttgttatggatgggggttggggattagcggtggtagggagtgggatggtataatttagatttttcgtatgggtagtttataatatagtttataaaggtttgtatttttgtgagaatttaatgtttttgtcgatttgatagtaggttattagtggtttgtggtttaggggttgggaatttttgggttaattgatgcgaataagatttaagtttttatggtttatttttggttataaatatattattaaatttttaaataaagatttagaatatttttaatattaaatattaaaataaatgggaattatatatatatttaaggtaggtttataataataagtaagataattaattatttagtttttggtgaattagtgagtgatggtggttatagtggtggtgggttatattaaggaataaatgtttgtaaaatgaaaatggtaaggagtattttttgttattatatagtttaaacgtaaagaagaataaatacgttgaatttattgagtatttttgtattttattgtttattattgtatagttgtatgaatattatgtattttataaatttttattttagaaatatttttatttattcgtttatttattttttaatttgtttattttagtttaaggttatggatgattggagtttatttcggtagtttaaggataagagaggaattaattttgtataggatgttattttatttattgtgggatgtagatatatatatatatatatatatatatatatatatatataaagttattttgttgggataatttagatttattaattaatttaatatgtatgtttttgggatgtgggataaaatttaaatatataaagaaaatttatgcggacgtggggagaatatataaattttttatggttagtggttttggttaggaatttatttatttttttattaatattgtaataaaacgttgaataaaataatgttataggaggattttttgtgttttttatagttttggaggttgggaagtttaagattaagatgttgataggtttaatttttggtgaatttagaattgaaggttttttggtaggggtgttttgtggttgtaggttgggtatagaaatttaggttttttattaggtttttatttatagaattttgattgggagggagagggttttattagcgtttttatatggtttttattgatattaggaagggagaagtgtttttttatatttggatagtggtgaaagttttagttttttatttggttttttttgataatattttggtaaagtgggtgaggagtgtttttttgtaatagggtaggtggaagtttaggttttttatatgggttttattaatattatagtgtggaggtggttgattattgataggtaggggtaaaagttttaggtttttagttggttttttttgatataagtttgatgggtttaggtagtgttttattatcgttaggtaatgggataagataaagttttttatttagtgtttgttgattgaggcgggatggaagtttttgatttttttgtatttgattggagtagtgcggttattgttagttatttgtttggtaggttgtttttttttgtttttttggatagagaaatatgttttttttaggatatttttgtttgtgattattgatgttttttgttttttagtttttttagtatttatttttggatatattaggtagaaagaagatttatgaaatttattattttgttattttttaattttatggtttgaggttaatttgttttttttttttattatttaagggttttttatgtttgtttgtagttgtatttagtaggaagaataggaagaattgtatttattttattttgttttagaattagaaattttttattatattttttaaaatatgtttttgttatatattaaaatattatatatttatttttagatttttaaataaatatataatttatttttagagttaagttaatttggtaataaaaataaaataagattaaaattattaattgtgttaaagttataaaaaatatgtaaatttttgtttaaaatatgggaaatgtgcgtgtgtgtgtgtgtattttttatgtatatatataaaaaaagatataaaatgaaaattgttgatgtattaatattcgggggtagggagtatttttaggtttaattaagtatttatatttaagtttttattataggttatatttggtttttagatttatttagaaggatattagataggagttaaagtatgttaaagtgttgaattaggtttttttttttagtgggagaagtttttgaaatagtttataatttattttaggtgttagttttattttttgtttttattttttaagtgataatttaggtataaggagttgaatttatatttgtggaagttgtgtttatcgtagtttagaatttttatgttatttacgagttagtattttttataataaatttatgggtatagtttttagagttttcgtaaagggtatgtttagttataagggttattgtatttggaaatatttaaattatgggttttcgttatttgttacggtttatgaaatattttttttagtaaagatataaaatgttaattagaagttatttgtgttataagtaatgttgtttaaaaatttagttgatattttttttttattaggtttttagaaaatagttagaaaattagtttaagattaaatatattatggagaagtagaaagggtgttataaagtatttatttataagatttaaaatgaaatatagttaattttgttcgttttaagatattattttaatttttaaattatttaaaagaagtatattttatattttgtgtgtttatttaaaaaaggtatggtaatatttataaaaagattttaaatatttttataagttttaaatattttataagtaattttataaatgaaattataaattatttaagtgatttaattaaattaaatatattttgagtatgtatataagaaaaaaattagttgaagtattttgatttaagaaatttttgattttttataaggtgtttgaatatttaatgttaaaaatatttatgaagaattaaatattgttgattataagagggaaatttagttttagttatattataaattagaaaattaagggaaaaatatgtgttttgagaatttttgaaatagttatatataaatatagtatataagaaaaaattaatcgttatttttatttaaggatatgtttgtggtatgagtggttttagtgttttgagtggattggtttttggattttatatattattggttatagagatagagatttgatttagaaaattatagttgttattttttaagtaagtttttgattaaaagattagatttttttaaatttagtttttttaggtaaaatggaaatataattattatttaataaatataagtaagttttagtgttatagttatagtagtagtatttttaattggtaaaaagaaattggattttaaaaaagaattttagtgaaagtagtaatagttttttggtatattttttatttttttttttattttaaaggtttaaagtttttaagtaattttagaaatttaaaatagtttattttttatttttattattggtttttaaaaaatattttgtagtatggattattgtttatgtatagatgttttttaatttaataatagggttatgttttaataaatttattataatttgaaaatattttaagttgaaaatgtatttaatatattaataaatttattataaagttgaataattataagttaaattataagttagagattatttgtattagtttaagttttggaatggtttattttttagatgttatttagttatttatatttttttttattttattgtgagaattaattttttttttatattttgtgtttgatttatgttatatttagtgtgaataagagttattttttttttatgatttttatttttttgtgaaaattttttttatttatttacgatatttggatttgaaattttatttatttaagtattttaaaaaattattttttattattttttttattaggagtttttagtgattttttttttatatttttaattttttatttttatattttttgtttttttaattttattatagtaagtgttttatatgtttagaatttagtttttttattatgattgttaattatgtattttaaataaatcgttttttagttttttgttttttatttttaattatattttttagaaaagaattaagagtagaaaaagattgttatatagatatttttatgatttttagaaatgagtatagattatgtttaatgaaaaaagatttttaaataatgttgtatatgtttagagaaaaggtggtagaaatgattgtcgtttgggggtattattgtttggatatggttagtttttagaattttagtttttaaatttttttttaattaaaggaaaagttttttaagggttttatagaaattttgttatttttatttgaaagaataatttttagttatgtggtatatggttaagagtaaaagtttttagttatttggaagtagatagatattgtaatgttaaataattggatataatatggaatttattgaggttttaaatattaattttattttgggaaaaagagtagtaattttaaaagtgattgaaagtaatttaagtttattttttaatagagtgatgtttaatttaataaaaaatatgttatatgtatatttttttttattattttgtaagaaaattggattaggaaatatagttgaaatggttagttttgtttttattttttaaatcgtgttataattatgtttatgtgattagtaatagataatgattatgatttatatttttttatatgtttgttgttttgtttttaatgtttgtggtttttttttagtattagttaagaggttattaatatagatatttatttatggatatgcgagattgttgtttattttttttgtagaatttataaagaaatgatggggaaaatatattaaagatagagtggataaagtaaatgtgttatatatatattatggaatattatgtagttatgaaaaagaatgagtttatgttttttgtagggatatggatgaagttggaaattattatttttagtaaaataatataggaatagaaaattaaatattgaatttttttatttataagtgggagttgaataatgagaatatatggatataggggtttgttgggggggtggggggtaaggggaggagagtattaggataaatatttagtgtttgaggagtttaaaatttagatgacgggttgatgggagtagaaaattattacggtatatgtatatttatgtaataaatttgtatgttttgtatatgtattttagaatttaaagtagaataaaataaataagtaaataaggaatgatgggataaataagtttttgttattgtttttttattgattaaagggtggttagagagtataggatgaagtagatttgtgatatttttgaatagatttgttttttattatgaattttattatttatttttagcgtatgtgggaaagggattaatttatttgtttggaatttagtgaaattgttttttagggggattaagagttttttttatttgatatgaagttgggtggttgaagatgataggattggtttttgtttttattagaattttaaagggtagggtatatggattagttggtattggattttggaaattgtgatgtattgggaatggttatatttttagagtttgtggatataaagaatgttttagtgttttttatatattagatacgggttatgaaggaatttgaagagtttattaaattttgtataagagaaaagttttatttggaatattatttaggtttagagaatataaatattttatttttagtaagacgtttttggtttttttttttttttttttttttttgaatttattttagatgagttatggttttaaagtgttagtagaacgtaagaaggaaggagaattatatttatttttgtttttaataatttatatagggatagaaagagatttatattaaattaagttgggatttttaattattatatagtattaaataatttaattgttgaattaagatatatttgtgtaatttaagggaattgtagaatagtatattaattagaattaagaaaataatttatgaagtatgttataatttttatttaagcgtaggggaatagtatttttaatgaaattttttaaagaggtaagagtaggtataatgagtttttgtttgattaaagattttatttagtgtttatttaatttagtaattatatttgtatgttttagatgtttttaaaaaaataaataaaagaaagtattttaaataaagaataggattaaatagtatttaaataattgagtaaattaaaaaattatatgaattagattgattgaaattgatatttttttaattttttttttttaatatatagatatatatatatatatatatatatatatatacgtatgtatataaatatatttgaattttataaaattattttgattttgatgagattttatagtttatttatgtaatagaatataatgtttaaatgaagtttttggtttttgttttatatggatgattgagtaaaattattttttatttttggaagaatagttaagaaaggatttataggtgaggatatgcgtttttttagaagatgagaataaagatgagaagatgagagtaatagaatgttttatattttaatgttttgtgttgatttcggagtggttaatatgatagagatggaaggaattttgaaaataaattgttagaatttttaaggaataggagatgttgagtgagtgaattaagttatggattggttgtatgggggtagttattagagataattatttttagatttttttggtgattggttaagttaatttttttttttagagttttttaattataagatttagtttgtgttatttagaatagataagaatatagagaattatagaataatttgattataggtttttaagttatagtaatgaaatttgtagttggtcggtaggaaaatattttgagatgtggatttaaagtttttaagtgtgtatacgtatatatatatatttttatttgtatgcgttttttaatttataaagattatttaagtaaagaggggtaattttatattttaggaggtttgtataaagataattttggtttttaaagtatcgggttttaggtagaggtgaagagagaatgaattaaatttaaattgttatttttttaggttaaagatgagtttagttattgtggagttttttattaatataggatatgttaggaaggtttattaatttattgttttagtatatttgttaacgttttagtgtatttgttgatattaatagtttatagtttttattttgatagggatttattttagtagattagtttttgtgattttttaggatgcgaaaaagtaatataagaaaagttttttatgtagtgaattgagaaggaaatatttagattaatatttttttagtatttttggtaggaagtttttagtaggagaaaaatattatgaagatttttagtgtagaaggaaaagggggtagggggtggtggaagggaagttaaaagaaggggttggaggtttttagaatttaaattatataaataaatgaagtattgaggttttagatttgatttgggtttagtgtgaaagttttaatttatttttttagaagaatatgttttttggttttagatttggtattgtggggagaattagagtgatttatggtggatatatatataaatatagatatatatatttgtatttagtaatttttgtaaaatttttatttgtttttttgattttgtttgtatttttgggaatagatgtaagaatattatattttttaggtttgttttgttttaggtttttgaacgtggaatatatttttttagggaaatttagtattatgagatttgggaggtggaagttaggttatagttattttagggataggttttatagatatgagttttggtagtagttttgtgttttaaagatatttatttttaggggttttagaggatttgtaatattagtagaggttttttgtgggtttttgattttttaaaattagggttttgtagtgatttttgtttttttagattttttaatagttttaagggttaattttttgtaatatatttagttttgtttagattgattatagggatttttattttttgattgaatttttatggttatagtggttcgttattatttgatattattaagaagtttttatttaggtgtttttggaaatttttttaaatatataggaaattagagtttgaaagaaaacggagaattatgagtattgtttaaataggaattttttttttattatagagaaagggaattgaaagttattttttaagttttttaaatttagtaattttataagaagaattaattagtgttttaggattaaatagtgttataagttgttgagtaataatttggattgaagatgttattataatatatgaaatgtttttgaatttattatgttttttttaagtattatttaagaataaggtattatggtagttagtaaagggtagatatagaaaattatatatggttttgtttttaaaagaggagatgataagtttaaattataggattagatttttagtatagattgatattataggtttttatttggtttatttttttgattttttattttttaggaaaggtatttttgaaaaattgtaggagagattatgttgtaggtttttttttagcgatttaggagttaatgttatagtgtgtttaaagttttttgatgcgattagataattagtaatgtatggaatatttgtgtttataatttgtgagaacggttgtatggtaggataagattttagtataatagtatggaaaatttattttaagtagatatgttatgattgatgttgaataatggatttattagttaggtacggtggtttatgtttgtaattttagtattttgggaggtagaagtaggtagattacgaggttaggagattaaaattattttggttaatatggtgtaatttcgtttttattgaaaatataaaaaaaaaaaaaaaaaaattggtcgggtatggtggcgggtgtttgtagttttagttattcgggaggttgaggtaggagaatggcgtgaatttaggaggtagagtttttagtgagtcgagatcgtgttattgtattttagtttgggcgatagagtaagattttcgtttcgaaaataaaataataataaaaaaaataatggatttattattcgatgggtttttttattgttaggttattttttatggaagtatttgtattttagttttttttgtggaaagaatttaatatttttttttttataatattgtatttttagaaataagagagtcgaagttttttaatttttaggagtgtttatgttgaatattaaaatatattttttagagtagatttttaataattatatgataagagaaaaatttttataattttatgatatgagggaaggaatattaaagtcgttttgtgggttattatttttaacgtttttaatagaataggttttgttagttgggtgcggtggtttatgtttgtaattttagtattttgagaggttaaggcgggtaaattacgaggttaggagtttgagattagtttgattaatatggtgaaatttcgtttttattaaaaatataaaaattagtcgggtatggtggtgggcgtttgtaattttagttatttaggaggttgaggtaggagaatcgtttgaattcgggaggcggagattataatgagttgagattacgttattaattttagtttgggcgatagagtaagattttgtttaaaaaaaaaaaaaaaaaaaaaaaaaaaaaaaaaaaaaaaaaaataggttttgtttattatatttttttatatttattgatttgaatttttaaatgaggtgtgtttattagttaattttaattttttgttatatataagatggtagagatgagaagaaggtagtttttttatagtttattatttttattaattattatttgtgttttaagatatagttttttatttttttttagtgttgagagtgttgaattttagagtttttttttttattttttttaaatgagatataatgttagttattttaagtttttggtttgagttgtttattttgaagtttaggattttaagaagtatgaaagagtttttttagtgaagttatgtttttagtattgttaaaatttagataatttttatggtttgataatttattttttatttgggtaatttattgttttttacgtaaattttttagttgttatggtatagatatatgatttgtatttagtttttattttaggtgtttttattgattttatttttattaatgtgttttaggtatatttttgtttagaatttagattggggttaaagagtttgttcgttattgattaatagttttaaatatttgatttgttgtcgttgttgttttgtttgtttaagaattttatttttttatttaatgaacggagtattttgtgttttggattttttgtaagaattttttttttagtaatagatgcgttattttaaaatatttttttgattggttaaagagtaattgatttgtattttaatggttagattttattatattttatattttttttttttttatttttgtttgttttgttttattttcgagttttattgatttttaatagagcgtttaagaagaaaatggttataagtggagtttttgtgttaggattttttattatagttgtgttgatgagcgtttaggaattatgggttattaaaggtaggtgttgagggaatgaaatttgggacgatagattacgaagtattggagaaaagatttatggatatttggaagataatgtgtggagtgaaagaatagtgtgataggtattatgtggtttcgatagaaagtataataaattgtggtttggtggagttttttttttattataaattgaagtaagttaaatttggtttagaggattaaaattgagttgtgtattgatgaatagtaaggttttgttataagttaaattgggggtgggggtgggggtgggggaggaagaatattttttggtaagtattaataagttatatttttgggttttaattattttttttggaaaattagtaaaattaaaaattaaaaattatatatagttttgttagaattaaatgaaaaaaaaagttattagttttgtttttatttgaatatatgatatagtagttattttttggagtgtaaattttgtcggtatatattgagtatatatattgtgttgaagattattagaaggaaaagttattaaaaagtaataatttattttaggaaaaggggagggaaggtatgttgatatgagttgttttatgggatagtgatagttattttttgtttttttatttttatggtatagtagattttatattatgttaatttagtaatatttttaagagagtagaaaaatgagtaaggaaatggggaatttgatattatttttttttatttttagagtaatattggtgttgttgtaaagatgtattgtagaaaagtattttttatttagtatgatttttatagaaggtgttaggtagatttgaaataagtaaagtaataatttagtttttatatttatagtggtaattgtagatttttattgttttaaaagagttatatatagggatatttatttagaaagatagaggttttttttttggtttgtgaagaggtagttagtatatttgtgtgtgtttgtatagatgtaaacggtaaataaatttttaggtttattaatatatagttaaatattaaagttttttattttggttgggtacggtggtttacgtttgtaattttagtattttgggaggtcgaggtaggcggattacgaggttaagagatcgagatcgttttgggtaatatggtgaaatttcgtttttattaaaaatataaaaaattagttgggtatggtggtatacgtttgtagttttagttattcgggaggttgaggtaggaggattgtttgagtttaggaggcggaggttgtagtgagttgagatggtgttattgtattttagtttggcgatagagtaagatttcgttttaaataattaaattaaaataaaataaaatattttattttatttttgaagattaaggaaaaaaaaattttttatttatcgatatattttatagaggtagtatattttttaagtgtagttttttttttttatgtttattatttttttggtgttggttatttttaatgttaattataatagaatattttttataataatagttttaatttaaggagtattaagataaaaggtggaattgttaaggttaatttagacgagaatttttttatagaggtaattatcgtgtgggtttggatgttgggaagtagggggattatgacgttataaggttttagttttaatttttggagtattttagtttttaggtatattttttatagatttggtttttaaataaaaagaagtttttgattttaaaatgtaaatagtgtttgttatagttttgttgatatattaagaaattatttattttattttatttaattttaaaaataaatttttgataggattaaaattatagtagggttatataataggaaaattatatataaataggtagaataatttgtttaggattattaggtaagttgttgaataagaatttaagatgtttttgattttagagtttaaaatttaattttttaaatagcgtttttttttttttagagtataatgttttgagaaagagattttttggaattttggtttaagtgtatttaatgttcgggtaaagaaagtgagagaatatttttttttaggggttgttgttggatttttaaaaagaaaataattttttagttagtaatatggagttaaataatagttttataagattttgggttttttagtttttattttttttaatttattttttttataattagttttttttgtttttttttttttagttttgtttagtagtatgttttttatttagattttgttttgttatttatttttattcgttattatttttttattttttttggtttaatttttttttattattttttgtttatatgtatgtaggttatttattttttttttttgattttttttatttaattttttttttttatttttcgttttttagaagaatatgtgattatttaggtcgagttttatttgaattttgattaattaggcgagtttatgtttgattttgatggtgatgagattttttatgtggatatggtaaagaaggagacggtttggcggtttgaagaatttggacgatttgttagttttgaggtttaaggtgtattggttaatatagttgtggataaagttaatttggaaattatgataaagcgttttaattatatttcgattattaatggtatttttttttttgttgtatttttggatatgggaatttatagtttgaaagtagttgttttagttttttgtgttagattattgtaattgattttttttttaagggtttaattttgttattaataagttttaaatttttatgttagaggtttgagaattttatgggtttgattttattttgttgtgtttaagttttgtttttgttatttatggttttttataaagttattgttttaagtttatgttgggggagttagaagggaagtttttggatattttatattttaatattggtttaattttttggggagggggtgttgttagagattgttatttgaggatgtgatatagattttttagggtataattttaattatttttttagttttagggtttttagatacgtttgtattataattgagtatgggagggagaggggtgagtttaagtagtgatggttgatttttgttatgtttgttatgtgttttttagtatttttagaggtaattgtgtttacgaatagttttgtggaattgagagagtttaacgtttttatttgttttatagataagtttattttattagtggttaatgttacgtggtttcgaaatggaaaatttgttattataggagtgttagagatagtttttttgtttagggaagattatttttttcgtaagttttattattttttttttttgtttttaattgaggacgtttacgattgtagggtggagtattggggtttggatgagtttttttttaagtattggggtatggattaatatttaattttttttattttaaggtttttttttatgatgtttgtgtgaaatttggtgttttaattgttttataatatttgttataattaatataattgtttttttttattatttagttttcgtttttttttaatttgtaatttttttaatatattattttgttttttttttttttaatttatgaataatttttttttttattaagaattttatatttgattttgagtgttatttttttttatatttattattatgtattttgttttatttttttttagagtttgatgttttaagtttttttttagagattatagagaacgtggtgtgtgttttgggtttgattgtgggtttggtgggtattattattgggattatttttattattaagggattgcgtaaaagtaatgtagtagaacgtagggggtttttgtaaggtatatggaggtgagttaggtgtggttagaggaagatatatatggagatatttgagggaggaaaatagggtggggaaaggaaatgtaatgtatttaagagataaggtaggaatagatgtggtttttgatttttttttgttagaacgaattagatattggtattatttggtattttaaagttttagggtttgttatttttttttatagacgggtattttgattacggttttagttttagaaattatttttagtatttaaaattattgttttatattagaatattgagtttagggatttagaaaatattgagtttagggatttagaaaaataagttttaagatttgggtatattttagtttgtattttttggggtaggttattagtttagaagtatttttagattttggttttttttaggttagggttaatttattgtatgaaatgggaattttttagaggttaatgtttgtttttgtttttttagttttaaatgtagtatgagaaattttaaaaaaaggtaaagtatggttgtttattatgtttagttggagagtagggtatatagttagtttatgttggaaaggttagatgaatattgaaagaattttgtaaagttaaaggattaagagagaagaggaaggaatttgaagtaaggagtttaaaattgattttaaattttttggtaattatgtgtgttttgttataggtgatggtgttttttagagagaagattattgaagaaatttttgttttaatggttttataaagttggtaatattataatttttgattttagtgaaagtagttatttttagtattttttagttttatagttattttaagagtggttatgttttttcgattgttttatattttaatatttagttggtttttttgtttattgtttttttttgtatttatttttttttattttttattattttattattattatgtaatgtttttggaataaaatatataggagtttgtttttgttatggaatgttttatggggtattttttgtgtatttattgtttaaggtttttttaaattgtgatttttttgaatataataaattattttgaagattttgggtggaatttttggtgtttaagttagttttttgggtggcggtggggggtggggagtcggttttggggaatatatgtgattttttttcggtaaaatatttgaatgttgaatttattttataaattttagaatttattagatatatttcggtttatttgggtttggttttattttgtgtatttgtaggtaatttttttgttgtggtttagtttttattaggaaaatttaaagtggggttggtttgttgggagatttttattgagtaatgatataattttatttttagtagagtgaatttgaaattttaaggtatggattttagaatgtatgggatggaggggagtagatggggttagagtggggagaaggaagatagaagaatttataaatattgtaggatttatatattaatatcgtttattttagatttaatgagtaaagagattggatattgaagattggttttatttattttgttagatatagttttagatgtttattttattatcgagagagtagtttgattgatttttgaaattattttatatttgaagatgtgtttttgagtggaaaagttgagtgaaatttggggttggggagaaagatatgatattaagatgagaggaaggaatatttgaaatacgatgaattgttgtttatttgtttataaaattatgatttgatatttatttttaaaatagtttttagaatttgttataaattattaagataaattatttatgatagtgtggtagattgtaaataaatgttgttgaaatgagttaggtttgggttttattttggttgtattatttattagttatgtttttattggtattttatttaatttagttttatattatttatgaaaatattggtgttaatttttattatattgaattaatattagaattaaaaggaaaacgtaagtaaagtaattagatatatgtttagtgataataaaatattgtaaaaaattatatattttgttgttttttttaaaatttttatagagtgatgataaaaatttaagagaagttaaataaaataaggataaattaaagtattatgattttttaagttttattaataaataagaagtttttcggttgggtacggtggtttacgtttgtaatttagtattttgggaggtcgaggtgggcggattataaggttaggaaattaagattattttggttaatatggtgaaattttatttttattaaaaatataaaaattagttaggcgtggtgataggcgtttgtaattttagttattttggaggttgaggtaggagaattttttgaattcgggaggtagaggttgtagtgagtcgagatcgtattattgcgtttttgtttggtaatagattgagatttcgttttaaaaaaaaaaaaaaaaaaaaaaaaaagtttttttattgttggtttagagaattaaagtagaattttgagattattgacggtagaataggtatgaatgttttttttatatgattataaattttattataaaataaatagtttaatatagagaatatattaaaatttagataagtatggattaagaaagtaaaaagtaaatttatatattattatgtaagaaaattatttttggttaggcgtggtggtttacgtttgtaattttagtattttgggaggtcgaggcgggcggattacgaggttaggagatcgagattattttggttaatatggtgaaatttcgtttttattaaaaaaaaaaaaaaaaattagtcgggtgtggtggcgggtgtttgtagttttagttattcgagaagttgaggtaggaaaatggcgtgaatttaagaggtagagtttgtagtaagtcgagatcgtattattgtattttagtttgggcgatagagcgagattttattttaaaaaaaagaaaaaaaaaaaaaaaaaaaaaggaaaattattttaatagatttttatttttagagttgttttaagttaatagaaaaattgtagaaattgtatatagagtttttttatttttagtttttataatgtttaatattttgtattaatgtggtatatttgttataattgatgaattaatattaataattattattaattaaaatttatagttatacgagggtttattttgtattatatagttatatgggttttgataaatatataatattatatatttattattataggattaaataaaatagttttattgatttaaaaatgatttaggttttatttatttattttttttttttttttttgaattattggtattttttgagttatttattagtgttttgttttttttagaatgttatatatttgtaattatatagtatagagtttttttagatgagatttttttgtttagttatatgtatataggttttttgcgtatattgttatagtttgatagtttatttttttttaatgttaaataatattttattgtataaatgtattatggtttatttatttattaatttattgaaggatattttggttgtttttaatttttggtaattatgaataaagttgttataaatatttatgaatagatgtttgtgtagatataagttttttattttggataaatatatagaagggtagttgttggattatatggtaagagtatgtttagttttgtaagaaataattagaatattttttaaaatggttgtattattttgtatttttattagtaacgaatgagagtttttgttgttttatatttttgttagtatttggtattttggggtttgggattttagtaagaaagttattttaatatttttttattttaaaataattatagatttaggggaaattgtaaagatagtatagagatattttgtatacgtttttatttagtttttttaaatgtttatattttaagtaattatagtatagtagtaaaattaagaaaatattttgatataatgtgtatgtatagttttatgtatgttttattatatttgtagatttatgtaattattattataattaagtatagagttattttatattatagagatttttattatgtttttttttatagttaaattttttttatataattattttaataatttaaaattattaatttttttgttattaatttttagaatagtgttattttgaaaatattagttaaatggaattatgtagtatgtgattggtgttttttatttagtataatatttatgagatttatttaagttgttgtatatattaataatttttttttttttattgttaagtagtattttatggtttaaatgtagtatagtttgtttaattatttgtttattgaaggatattttggttgtttttagtttggggttattataaataaggttgttttgaatatgtgtttaaggtttttttatgagtatgagtttatgagtttttatttttttggtataaatgtttgggatataatttatgggtatatggaaatatatgtttagttttttaagaaattgttaaatttagttaagtatgatggtttatatttgtaattttagtattttgggaggttaaggaggaaggataaattgaggttaggaatttgaggttagttttagcgtttatatttttttttttttttgagatagagtttcgttttgttgttagattggagtgttatgatgcgatttcggtttattgtaattttcgttttttaggtttaagtaatttttttgttttagtttttcgagtagttgagattataggtgtatattattacgtttaattaatttttgtatttttagtagagatagggttttattatgttggttaggatggttttgattttatgatttcgtgattcgtttgttttggttttttaaagtgttgagattataggtatgagttatcgtgttcggttaaatgttttgttttgtttttgttttttgtttttttgttaggtggatgaggtggtatgtttttatagttatagttatttgggaggttgaggtgggaggattgtttgagtttaggaattcgaggttgtagtgagttattgtattttagtttatttgatagagtaagattttgtttttaaaaggaaggaagggagggaagaagtaaggaaggaaggaaggaaggaaggaaggaaggaaggaaggagaaaaaagaaggtagggagggaggaaggaagggagggagggaggaaaaaagaaagaagaaaggaagttaaaaagaagggagggagggaggaaggaagaaaggaaagatggaagaaaggaaggaagggagggaggagaaagagaaagaaaaagaaggaaggaagaagggaaggagggagggaagggaggaagggagggagggtgaaaggaaggaaagaaggaaggaaggagaaagaaaaggaagagagaaagagaaagaaaaaagaaagaagaaagaaagaagaaagaaagagagagaaggaaaggaaagaaggaaggaaaggaaagaaagaaaaagaaaaaggaaggaaggaaagaaggaaggaagaaagaaaaagaaagaaagaaggaaggaaagaaagaaagaaagagaaagaaagaaatcgataaattattttttaattgttttgtgggagtatggttatttttattatattgattttttttttttttttttttttttttttttttgcgatagagtttggttttgtcgtttaggttggagtgtaatggcgtgatttcggtttattgaaatttttgttttttgggtttaggtgatttttttgttttagtttttttagtagttgggattataggtgtatattattacgtttggataatttttttgtatttttattagagatggggttttattatgttggttaggttggttttaaatttttgattttaggtgattcgtttgttttggttttcggaagtgttaggattatagatgtgagttatcgcgtttagataatattgatttttttttttttatgaatatgatatttttttttatttatttgtgttatttttgagttttttgagtagtggtttgtagttttttttgtagagattttttttttttttagttagttgtatttttaggtatttcgtgtgtgtgtggtaatcgtgaatgggattacgtttttgatttggtttttagtttgattgttgtggtgtataggaatgttagtaatttttttatattaattttgaatgttaagatttcgttgaagttgttaattagtttaaagagtttttgggttgagattatggggtttttttgatataggattatgttatttgtaaataggtatagtttaattttttttttttttgtttggatgtttttaatttttttttttgcgtgttgttttggttaagatttttaatattatgttggataggagtagtgagagagggtatttttgttttgcgttggtttttaaggggaatgtttttagtttttttttatttagtatggtattagttgtggggttgttatagaaggtttttattattttaagttatgtttatttattatttagtttattaagagtttttaaatgaagggatattgaattttattaaaaattatttttgtatttattgagttaattatgtggtttttgtttttagtattgtttatgtaatgaattaaatttattgatttgtatatgttgaattaattttgtattattaagataaagtatatttgattattgtagattagttttttaatgtattgttggatttagtttgttagtattttgtggaggatttttgtataaatttttattaataatatttgtttgaagtttttttttgtgtgtgtgtttgttaggttttggtgttgattttgatgatgttggttttatagaatgagttagagaggtattttttttttttaattttttggattaattataataggaatggtattagtttttttttgtatattaggtagaatttagttgtgaattattttagttttaggggttttttttgtttggtagtttatttattattgatttaatttttgagattattattagtttgtttagggattgaatttttttttggttttgttttgggagggtgtacgtgtttagaaatttattaattttttttagtttttttagtttatgtgtatagaggtgtttttaatattttttgatggttatttgtgtttttgtggggttagtggtaatatttttattgtaatttttgagtgtgattatttgaattttttttttttttttttttattagtttaattagaggttttttttttttattaatttttttttaggaaattaatttttggatttattgattttttgagtgttgtttttttttttgttttaattttttttagtttagttttgattttggttattttttgttttttgttagttttgatattggtttgtatttggttgattagtttttttagttgtgatgttaggttgttaaattgaggttttttttttttatgtgggtatttgatgtataaattttttatttaatattgttttagttgtgttttagagattttggtatgttgtatcgttgtttttattagttttaaagaattttttaattttttttttaattttattatttatataaaagttatttaggagtaggcggtttaatttttatgtaattgtagggttttgaatgaattttttagttttaatttttaatttgattgtattgttgtttgaaagattgttttttatgattttagtttttgtgtatttgttgaggagtatttgattttcgattatgtgattaattttagagtatatgttatgtggtgatgagaagaatgtgtatattgttgttttggtgtggataattttatagatgtttattaggtttatttgatttagtgttgagtttaagttttgaatatttttgttaattttttgtttcgatgatttgtttaatattattagtgagttgttaatatttttaagtattattgtgttggagtttaagtttttttgaaggtttttaagaatttgttttatgaatttgggtgtttttgtgttgggtgttgatttggtttggttgtgtttttatttaaattttattttgaattgtagtttttataatttttatatgttacgggaggtatttggtgggaggtaattgaattatgggtgcgggttttttttatgttatttttattatagtgaataagttttatgagatttgatagttttataaagaggagtttttttgtataagtttttttgttttgtttgttattatgtgagatgtgatttttattttttattatgattgtgaggtatttttagttatgtggaattgttagttaattaaattttttttttttgtaaattgtttagttttaggtatatttttgttagtagtataatagattaatagaggagagtggagtattgttgaaaagatatttgaaaatgtggaagtgattttggaattgggtaataggtagaggttgaaatagtttggagggtttagaagaagataggaaaatgtgggaaattttggaattttttagagatttgttgaatgtttttgtttaaaatgttgatggtgatgtggataataatgtttaggttaaggtagttttagatggaaatgaggaatttgttgggaattggagtaaaggtgatttattatgttttagtaaagagattggtggtattttgtttttgttttagagatttgtggaattttgaatttgagagagatgatttagggtatttggtagaagatatttttaagtagtaaagtatttaagaggttatttgcgtgttgttaaagttatttagttttataagggaagtagagtataaatgtttggaaaatttgtagtttgataatgtaatagaaaagaaaatttaattttttgaggataaatttaagttggttgtagaaattttatgggtaacgaggagttgaatgttaattattaagataatggggaaaatgtttttaaggtatgttagaggtgttttttttttttttttagagtttcgttttgtcgtttaggttggagtgtagtggtatgattttagtttattgtaagttttgtttgttaggtttatgttatttttttgttttagttttttaagtagttgggattataggtattcgttattatatttggttaattttttgtatttttagtagagacggggttttattatgttagttaggatagtttcgattttttgattttatgatttatttatttcggttttttaaagtgttgggattataggtgtgagttattatgtttggttatgttagaggttttgatggtagttttgtttattataggtttggaggtttaggaggaaagaatggttttttgggttgggtttagtgttttcgtgttgtatgcggtttttggatttggtgttttgtgttttagtcgttttagttgtgattaaaaggggttaatatagagtttaggttacgattttagaggatgtaagttttaagttttggtagtttttatgtggtgttgagtttacgtgtatatagaagttaagagttgaggtttgggaatttttatttagattttagaggatgtatggaaatgtttggatgtttaggtagaagtttgttgtttgggtagggtatttatgtggaatttttgttagggtagtgtagaaaggaaatgtggagtgggtatttttatatagagtttttaatggggtagtgtttagtggagttttgaaaagaggaatattattttttagattttagagtgatggatttattgatagtttgtattatgtattggaaaagttgtagatatttaatgttagtttatgaaagtagtttggagggaggttatattttgtaaagttataggggcggagttgtttaagattaggggaatttattttttgtattagtgtgatttggatgtgagatatggaattaaaggaggttattttttggagtttaagatttaagtgttttgttggattttagagttgtatggagtttttaagtttttttattttggttagttttttttatttggaatgggtatatttatttaatgtttgtatttttattgtgtttaagaagtaattagtttgtttttgattttataggtttataggtagaagggatttgttttgttttagatgagaatttggattgtggattttgagttaatgtagaaataagattttggggtatttttgagaaggtatgattggtttgaaatatgagggtatgagatttgggaggggtcggtggtggaatgatatggtttggttttgtttttatttaaattttattttgaattgtaggttttataatatttatatgttgtgggagggatttggtgggaggtaatttaattatggggtaggttttttttatattatttttgtgatagtgaataagttttatgagatttgatggttttatgaaggggagtttttttgtataagttttttttttttgtttgttgttatgtgagatgtgttttttattttttattatgattgtgaggtttttttagttatgtggaattgcgagtttattaaattttttttttttgtaaattgtttaattttaagtatgtttttattagtagtatgataatggattaatataaatgaatatatatttaagaaatggataaatttttggatatatatatttttttaagattgaattaggaagaaattgaatttttaaatagattaataatgagttttgaaattgagttagtaataaaaagtttattaattaaaaaaagtttgggattagatggatttatagttgaattttattagatggataaagaagatttggttttatttttattaaaattattttaaaaaaattgaggagaagggattattttttaatttattttgaggttagtattattttgatattaaaatcgggtagaaataataaaaaaagaaaattttaggttaatatttttgatgaatatagatgtaaatatttttaataaaatattaataaattaaattaagtagtatattaaaagttaatgtattacgattaagtagattttatttttgagatgtaaggttagtttaatatatataaattaataaatgtgatttattatataaagtagaatgaaaggtaataattatttgattattttaatagatgtggaaaaggtttttgataaaatttaatagtattttatgttaaaaatgtttagtttacgtttgtaattttagtattttgggaggttgaggtgggtagattataaggttaggagattgagattattttggttaatatggtgaaattttgtttttattaaaaatgaaaatttagttgggtatggtggtatgcgtttgtagtcgtagttatttaggaggttgaagtaggagaatcgtttgaatttagaaggcggaggttgtagtgagttaagattttattattgtattttagtttgataatagagaaagattttattttaaaaaaaaaaaaaaattttagtaaattaggtattggaggaatatattttaaaataataagagttattaatgataaatttatagttaataatatagtgaatgggtaaaagttggaagtatcgtttttgaaaattagtaggagataaggatgtttttttttattattgtttttttttttttttggagatagagttttgttttgttgttaggttggagtagtgtagtggcgcgattttagtttattgtaatttcgttttttaggttgaagtaatttttttgttttagttttttaagtagttgggattataggtatatgttattacgtttggtttttttttttttttttttttttttttttagtagagattaggttttattatgttagttaggatggtgttgatatttttatttcgtgatttatttattttagttttttaaagtattgggattataggtgtaagttattgtgttcggtttttttttattatttttatttaagatagtattggaagttttgattagaatattaggttagagaaagaaataaagggtatttaaagaggaagagtggaagttaaattatttttgtttgtagatgatatgattttgtgtttagaaaattttaaatttttaaattttggtttaaaagtttttttagttgataaataattttagtaaagttttaggataaaaaaaattaatatataaaaattagtagtatttttatatataaagaatatttaagttgagatttatattaagaatataattttatttataatttttatatatatatatattatttaagaatatagttaattatggagatgaaagatttttataagaagaattataaaatattgtttagagaaattagagatgatataaataaatggaaaaaattattatgtttatggataggaagatttaatattattaaaatggttatattgtttaaagtaatttatagatttaatgttatttttattaaattattattgatagtttttatagaattagaataaattattttaaaatttatatggaagtaaaatagagtttaaatagttaaggtaattttaagtaaaagaataaagtaagaggtattatgttgtttaattttaaattatattatgaggttatagtaattaaaatagtatggtattggtataaaagtagatatatagataaatggaatagaatagagagtttagaaataatgttgtataattttaattatttgatttttgataaagatgataaaaataagtaatgaggaaaggattttttatttaataaatagtgttgtattaattggttagttatacgtagaagattgaagttggatttttattttatattatatataaaaattaatttaaaatgaattaatgatttaaatgtaaaattaaaaattataaaaattttggaaagtaatttagaatatattattttgaatataggatttggtaaagattttatggtaaagatattaaaagtaattataataaaaataaaaattgataaatgggatttaatttaatttaagagtttttgtgtagtaaaagaaattatcgatagagtaaatagaaaatttagagaatggagaaaatgttaagttttaattcgggaaaaggagttaggttggtgggattagaagaaagtaaagaggtaaaataaataagttgtaagtttgtttttttttatggtttagaatatatagtttttttgtgtaaataatttatagttttttcgtgtttaattattattagatatttataagttagtttattgtaattttggtattgttgttattgtatatagtattttgtagtttaagaattattttataaaattttttgtaagtttttgttttcgtgtagttagttttttttttgttggtttgtttgtttgttgtttttttgtaatatatttttttattttttttaataaatttgtttttttttttatttataattgttttggtaaatttttttattttggcgttattggtttagatagttattgtttatttgtaatagaaaatatttgtaaattatgtatttgataaaggtttaatatttagaatttataaggaatttaaataaatttataagaaaaaaattaaattattttattaaaatatgggtatgaatagatatgaatagatattttttaaaagaagatatatatgtagttaataaatataggaaaaaattcgtaatagtattaattattagagatatgtaagttaaaattataataagatattattttatattagtgtgaatggttattattaaaaagttaaaaaataatagatgttggtgaggttgtagggaaagagaatgtttatatattgttaatagaaatgtaaattagtttagttattgtggaaagtagtggggtgtaaagaattaaaaagaaaattattatttgatttagtaattttattattgtgtatatatttaaaggaatataaattattttattataaagatatatgtatatatatgtttattgtagtattgtttataatagtaaagatattgaattaatttagatgtttattaatagtggattggttaaaggaaacgtggtatatatatattatggaatattatgtagttataaaaagaatgagattgtgtttagaattggtttttttcggtgggtttttggtttcgttgattttaaaaatgaagttatgaatttttgtggtgagtgttatagtttttaaagatggtgtgttcggagtttgtttttttagatgtttaaatgtattttaagttttttttttttggtgggttcgtggttttgttgattttaggagtgaagtcgtagatttttgttgtgagtgttatagtttttaaaggtggtgtatttggagttgtttattttttttagtgggtttgtggtttcgttgatattaggagtgaagttgtagatttttatagtgagtgttatagtttttaaaggtggtgcgttttgagttgttcgttttttttggtgggtttgttgttttgttggttttaggagtgaagttgtagattttagtagtgagtgttatagtttataaaggtagtgcggatttaaagagtgagtagtagtaagatttattgtaaagagtgaaaggataaagtttttatagtgtggaaggggatttgagtgggttgtagttgttggttgggttggttagtttttatttttttatttggttttgtttatattttgttgattggtttattttatagagtgttgattggtacgtttataaatttttagttagatatagagtattgattggggtatttttatagagtgttgattggtgtatttataaatttttagttagatgtagagtgttgattggtgtgtttttatagagtgttgattggtgtttttataattttttagttagatagaaaagttttttaagtttttgtttaatttagaagtttagttagcgttattttttaagattatgttttttgtaggaatatggatggagttggaggttattattttatgtaaattaatatagggataaaaaattaaatattatatgtttttatttataagtgggaattaaatattgagtatatatggatataaagaagagaatagtagatatggggatttatttgagggtgaaggataggaggagggaaaggattaggaaaaatatttgtgagatattatgtttattattttggtgatgaaattatttgtatattaaatatttgatatgtagtttatttatagagtaaatttgtatatgtatttttaaaattaaaataaaagtttaaaataaaaaagaaagaaattagtttaatattttttttttagtgaaatgtttatgtaaataaatattatatatttttattttagagatttcgggattataaagggagtgtattaaggatagtttgtgattagtttttttatattattttttatattattattttttatttttttttttttaaatttttatgttaatagtagattaggtaagttttttttttttgtatttttaatgatttagggcgattaaggtttttttttttagttttttgtattattatttttatttttattttattttatttttgtttagaaggttggaaggataagttgaagtttttttttgtgtttttttttatagtagatatatagataaatttttattttatatttatttatttgagtttttttaattttttttggtttataattttatatttttttatagggtgtttacgtgtgtatatatatatattttttgtttttagggattttattttttttttttattcgttttgtttatttcgtttgtgtatggagaagtttttaaaaatttcgtagttgtgtttgtagtaggtgtttaatagatttcgtaagtagtttaagaggtttttttggttgtttgtatttttggattttttttcgttttagtttcgttatcgttcggaatttttcgacgtttttatggaagcgcgtatatttttttcggtgtggatgagtttttgtataaatcgtattcgttttgttttattgtagaaatagtattcgtgtttaatttgttttaagaaatgtgtcgtagggatatgaagaatcggttttttgggcggtattttaggaaaagagtgatggttatgtttataattagtagggcgaggggcggaatattttgattggtttttattagttattttcgattatttaggggttttttttttatttgtttgaggcggagggaggttgcgaggggcgtggaatattatttgggattcgttatttattttcgagttgagttggacgtttttttgtaaggttttggattaggattattttttttattattgttttttgcgttttttttttttgggagtttttatttaaaagatatttttgtttttttttattatgttatattttatttattttttaaataagatttattgtttttattttgtaaatgtttttttagtgtttattttgtgttttatttgtgttgttttttgggaatttaaacgggaaaaatagattttattttttcgttggaggagtttaaagagaagtgaaattgatggtaaaaaattaaatacgtaatattttatataggaacgaaaaatgttaagagaagtgtggagttttagaagaaagaataggatgatttaaattatattagggtgttagagaaggattttgagagtgatagtttaaatgtgattttataggtttagtgggtgtgagttagggggtagagtggagttcgtgtgtgtttttggataaaaagggaggtatattttaggtaagtataatattatgtataaaagtttgaaagaattgatgaatttttttaagaaattagaaaaaagtttattaaagtatagtatgaaggaaaggaggggaaaagattaaattggagaaattataagaagggaataattaaaattattgttatgttaggatttcgatttatattaaatgtaatgggaaatagttgaagagtttatgattttaatataggtttataaatttttttttttggattttttaaatttagaaaatttacgaatttatttgttgttgtttttaatttgttgtcgaaatttatttggtaaatttgatttgaagaggtaaggatttaaaagtgttatagagtttttattggtgatatgtgtatttgtagttttaatatatataaatatataaatatacgtatgtatgtgtaaatatatatagattttaaatattgtgtatgtatatatttttgatgtttttgtatttatgtttaaatgaattatgaaaaattaaaaataaagaaaaatttttgtgtttaataaaatgagatgaatagaaagtatttttaaaataataatttttttttttaagttttgggtatatgtgtaggatgtataggtttgttatataggtaaatatgtgttatggtggtttgttgtagttattaatttattatttaggtattaagtttagtacgtattagtttttttttttaatgttttttttaattttgtttttttttagtagattttagtaagtgttgtttttttttttgtgtttatgtgtttttattgtttagtttttatttatatgtgagaatatgcggtgtttggttttttgtttttgtgttaatttgttgaggataatggtttttagttttatttatgtttttgtaaaggatatgattttatttttttttatggttgtatagtatttcgtggtgtatatgtattatagtgaatagaaagtattttatattattagtagtataaaatgtagaattattgtagaaatttgaggtattttattgaaaaatatttgggatagtcgttattatttatgatttataattattagttgttgaaagttaatagaggtaataattattaagaatatattaaaattttgaaataaattgtataaagtaaaaaagtaaaaatgaagattttgaatttgtattgattgaatggatttattaagaaagtagtgaatttatgtaattgtttaggtttttttttttcggtaatgaaataagtaaaattaagttatgaagagttgaattaagagataaatgtgttttaaaagtgtgagtatagaatttttagaagaaatataatgtaaattagtgtttttagttttggtattattgatattttggattagataatatttttttggtgagaggagttgtttattagggtttttagtttttatttgttatatgttagaagaaatttttggtgtgataattaaaaatggttttagatattgttaaatgttttttagggagttgggagagggaagggagggatagaggggtggtgaattatttttgggtgagatttattagtgtaattatttgaaatatttatggttaaaaagtcgttattaattatggaatatttgagatttatattgaaaattttgttaatattttatttatttaaaattttggttttatataaaatttaggatttttaggaatttggttttagtgtagagttatttttttagtaaaattaatttatttagaattaaggtttattgatttatttgttttgttagtcgttaagttatatttttaatttttgtgttattggtttattatttattgttttagttaatttattttttaatttttagttttttatttttaataatataaggaggtattaaattattaattttggatagaggtagaatttttatttttgtagttaagtttttttagaaggggagtgttatggtttggttgcgtaagtattttaattttgttttgaattgtagtttttataatttttaagtgttgtgggagggattaggtgggagatagttgagttatgggggtaggtttttttttatgttgtttttatgatagtgaataagttttatgagatttgatggttttataaagggaaaaatttttttgtttgttgttattttttttttgtttgttattatgtgagatatgttttttatttttcgttgtgattgtgaggtttttttagttacgtggaattgtgagtttattatagttttttttttttataaattatttagttttgagtatgtttttattcgtagtttgaaaatagattaatatagggagaaattaagaagatggtatttttttatagatagtttttaaaaaacgagtaagtttttagattttgagtagagatttttataagttttttttattttttagaaatgatagtagagaggagagtattttggatgagataaggtttattttattatttttaaattttttgagtattttttttatagataagaatgttggaaaataaaaatatgtgaagttgttgttattgtagtttgtatggttagtattgtagtttatgtttatgtgttaagtttagattgttatatttagtaaataaaaatagagggtgtttagttaaatttggattttaaatatattattgttgtttatttgaagttcggatttaattgggtattttgtattatatttggtaatttgagtttaatttgttaataatgtttagaaggagtgaatttaatatttttttgtgttttttaatatatgtttatgatagcgtgtatatagggaagtttttaaatgataaatgtaaaatgaatgaaagttttttttttatattgggattagtagattttgtattttttttttattttgagatatattttgtatataagaaattttattaataatttagatttagtttagttattatttattaatggtggttgtaagtttaggttttagaattaggaaatttgaatttaaatatgattttttttattagggttaattttaataattattaatttttaaaaatatatataaaatggatttaatagtaatatattttttataggattattgttgagggtaaaattaagtagtggttttttttagtgttgataatataataattattttaatatattattattttatttttataatttttataaaggaaagttttattatttttttattttttaatttttaaagtaagtaatatttagattatgatttggtaattgttttttattaatttattattaattattattttaaatatatgagggtagaaatattggtttatgtataatagtttatatgtttaaattttatataaaaggagagtgttgatgttaaagagagggaatttgtatatatttagattaaaattgtaatttgatttttagtattaattttgtgatagtgggtaagttatttatattttttgaattttagattttaaagatgtatatgtttttaaatattaaagatatgataggataggtattagatttttatattaaaatttataagtttggtaattagttattgtaaaatattataatattttacgttaatatagattagatttgttttgtttattattttatttttattatttagagtaataattagtatattttaagttattaataaatattggttgtatgaattaatagttttttgtataatttgttattattgtatataggggttttttagtgttttattgttaatgattgagtatttgtttttggttcgtaggttattttgtttttttttagtttttttgtttattttttttaggtttagttggttttttgattttagagtatagtttttttttgaggttcgttatttaaaagagttaaattttatttagtttttattttttttattcgttttttaaatggtttaatttattttttattttggatattttattgattgtaaatattaatttttttaaacgtagtatttgtttttttgttacgtttttattttatttatttgtcggtggtttttattataattggttatttttttatttcgaaaaaattatttgtttttgatttttatgtattatatttttttgggtttttttttttttttagtatttttggggaatttttttagttttttatgttgttttgtggttttttgatattttttttatataaaaatttatttttttttgtaattttttttatttttttggaatttaatatagaatttgtatcgattttaatataaatatttttaattttggttttattttgaattttttttttatatttagttgattttttgattgttttatgtgagtttaaaaattattttaattttaataaatataattgttatttttaattatttattttaaattatttttttttatatttttttttattttaataagtagtattattatttatttatttattaaggtaaaatatttagaaataagttatatttaatttattaataagttatgtaaaaagatattttaagtttgtttattttatttggatttgtttttgttattattatattatatgaagttaaaaatttgttttttttggagaattttgttgttttttagttgtgaattttaataatttaatttttatatagtagttagaattatttttaaaattgaatattatcgggggatttgttttgataattacgtaggtttttttttattttttttagcgttagttggtttgagaaataaagggatagagtataaaagagagaaattttaaagttgggggagatattatacgttggtaggatttacgatgttttataagttataaaaattagtaagtttttattagggatttttaaaaggggagggagtgtgcgaataggtgtgggtgatagatattaagtatttaatagggtaatagaatattataaggtaagtggaggtagggtgagattataggattataggattaaggcgaaattaaaattgttaatgaagttttaggtattattgttattgataatattttattaggagatagggttttgagattaatcgatttgattaaaatttattaggtgggaattttttttttttaataagtttgggagcgttatgggagattggagtttattttatttttgtaatttcgattataagagataggtacgtttcggggggttagtttagagatttatttttaggtgcgtatttttttttttagggacgttttatgttgagaaaaagaatttagtaatattttttttatttgtttttgaaagaagagaaatatggttttgttttgtttggtttatcggtagttagagtttaaggttattttttttattttttgaataattgttgttattttgtttttttttaaggtgtttatattttatattgtttaatatatatgttgtataatttgtgtagttaatgtaattattatatagttttgaggtgatatatatttttttcggttgataggattaagagattaaaggaaagataggtataggaaattataagggtattgattggggaagtgataagtttttatgaattttttataatttatgtttagagattgtagtaaagataggtataagaaattataaaagtattaatttggggaattaataaatgtgtataaaatttttataatttacgtttttttgttatggttttagtcggtttttttgtttggggtttttgatttttcgtaatataatattaatggattttttttgtaattttttaggagtttttaatatgtttaaataaaatttaattttttattatggttattaaggtcgaatatgatgtagtttttgatttttttttttttttattttattttttgttattttattttttgttttttattttttagtttttttaattttttttttgtttttttaatatagtatacgtttttttattttttggtttttttttttttttgtttgtttggaatatttgttttttagatttttatatggttgttttattgtttttgttttagttaaatgtgagttttttttagagagggtttttaaattatttgtgaatttaatgtgaagtgaagttgggtgaatttaattttttttgttttattattttgatgtttttttttttaaaggtaatattgttttttgaattttttttttttgttaaatatttattgggatattgtttgttttttttggtattgagttttatgagagtagggattttttttattttatttaagtagaattttttgagtttagaatagagattagaatataatttttgtttagaaatatatttgtggtttaaatgaataaatcgaagttttgggaattgattattttgggtattttagaaagtagaaaagggtttaagtttttgtatttttttattttaatgatatgttatatttttttttttttttgtgagaaattaaggtaaatttttttttttttttttttttagttggaagaaggatttatagataaggaaatagtgattgtaagaaagaaaaaatttttattgagaattattttttttttgtcgggcgtagtggtttatgtttgtaattttagtattttgggaggttgaggtaggcggattatgaggtaaggagtttgagaatagtttggttaatatggtgaaatttcgtttttattaaaaatataaaaattatttgggaggtggaggttgtagtgagttgagattgtattattgtattttagtttgggtaatagagcgagattttattttaaaaaaaaaaaaaaaaaagaattatttgttttttttttaatagtttaagttttagggtatatgtgtataacgtgtaggtttgttatatatgtatatatgtgttacgtggtgtgttgtatttattaattttttatttatattaggtatattttttaatgttattttttttttttttttttattttataataggttttagtgtgtaaagtttttttttttgtgtttatgtgtttttattgtttagtttttatttatgagtgagaatatgtggtgtttgtttttttgtttttgtaatagttttttgagaatgatggtttttagttttatttatgtttttgtaaaggatatgaatttatttttttttatggttgtatagtattttatggtgtatatgtgttatatttttttaatttagtttattattgttggatatttgggttggttttaagtttttgttattgtgaatagtgttataataaatatatatgtgtatgtgtttttatagtagtatgatttataattttttgggtatatatttagtaatgggattgttgggttaaatggtatttttagttttagattattgaggaatcgttatattgatttttataatggttgaattagtttatagttttattaatagtgtaaaagtgtttttatttttttataatttttttagtatttgttgttttttgattttttaatgaacgttattttaataggtgtgagatggtattttattgtggttttgatttgtatttttttgatggttagtgttgatgagtatttttttatgtgttttttggttgtataaatgtttttttttgagaagtttttgtttatatttttcgtttatatgttgattgggttgtttgttttttttttgtaaatttgtttgagttttttgtagtttttgggtattagttttttgttagatgagtagattgtaaaaatttttttttattttgtaggttgtttgtttattttgatggtagttttttttgttgtgtagaagttttttagtttaattagattttatttgttaattttggtttttgttgttattgtttttggtgttttagatatgaagtttttgtttatgtttatgttttgaatggtattgtttaggtttttttttagggtttttatggttttaggtttaatatttaagtttttaatttattttgaattaatttttgtataaggtgtaaggaagggatttagttttagttttttatatatgattagttagtttttttagtattatttattaaatagggaattttttttttattttttgtttttgtaaggtttgttaaagattagatagttgtagatatgtggtattatttttgagggttttgttttgtttttttgatttatatttttgttttggtattagtattatgttgttttggttattgtagttttatagtatagtttgaagttaggtagtatgatgtttttagttttgtttttttggtttaggattgatttggtaatgagggtttttttttcgttttatatgaattttaaagtagttttttttaattttgtgaagaaagtaattggtagtttgatggggatggtattgaatttataaattattttgggtagtatggttatttttatgatattgattttttttatttatgagtatggaatatttttttatttgtttgtgtttttttttattttattgagtagtagtttgtagatttttttgaagagattttttatattttttgtaagttggatttttaggtattttattttttttgaagtaattgtgaatgggagtttatttatgatttggttttttgtttgtttgttattggtgtataagaatgtttgtgatttttgtatattgattttgtattttgagattttgttgaagttgtttattagtttaaggagattttgggttgagacgatggggttttttagatatataattatgttatttgtaaatagggataatttgattttttttttttttaattgaatattttttattttttttttttgtttgattgttttggttagaatttttaatattatgttgaataggagtggtgagagaggatatttttgttttgtgttcgtttttaaagggaatgtttttagtttttgtttatttagtatgatattggttgtgggtttgttataaatagtttttattattttgagatatatattattaatatttaatttattgagagtttttagtatgaagggttgttgaattttgttaaaggttttttttgtatttattgagataattatgtggtttttgtcgttggttttgtttatgtgttggattatttttattgatttgtatttgttgaattagttttgtattttagggatgaagtttatttgattatggtggataagttttttgatatgttggtggatttggtttgttagtattttattgaggatttttgtatcgatgtttattagggatattggtttaaaattttttttttttttgttgtgtttttgttaggttttggtattaggatgatgttggttttataaaatgagttagggaggattttttttttttttattgattggaatagttttagaaggaatggtattagtttttttttgtatttttgatagaattcggttgtgaattcgtttggttttggatttttttggttggtaagttattaattattgttttaattttcgagtttgttattggtttatttagagatttagtttttttttggtttagttttgggagagtgtatgtgtcgaggaatttatttattttttttagatttttaagtttatttgcgtagaggtgtttatagtattttttgatggtagtttgtatttttgtgggatcggtggtgatatttttttattattttttattgtatttatttgatttttttttttttttttttttattagttttattagcggtttattaattttgttgatttttttaaaaaataagtttttggatttattgattttttgaagggttttttgtgtttttattttttttagttttgttttgattttagttattttttgttttttgttagtttttgaatgtgatcgtttttgtttttttagttattttaattttgatgttaggttgttagttttagattttttttgtttttttttgtgggtatttagtgttataaatttttttttattttaaagttagaattagtttttaaaattgaatatgaattgattttttttgtaattatttagtagcgttttatatttatttaaataaaatttaggttgggtacggagattaatgattgtaattttagtagtttgggaagttaagataggtagattatcggaggttaggagttcgagattagtttggttaatatggtaaaattttgtttttattaaaaatattaaaaaattagtttggtatggtggtaggcgtttgtagttttagttattcgggaggttgaggtaggaaaattacgtgagtttaggaggtagaggttgtagtgagtcgaggttacgttattgtatttagtttgggtaataagaacgaaattttattttaaaaaataaataatgaaataaaaaaatgaaaataaataaaataaaatttaaattttttattatggatattagagtttaatataatgaggtttttgattttttttttgttttttattttattttttgtttttgtatttttttgaatgttatagtttagtttttttagttttttttttgtttttgtatataattttttatattagggttttttattttttttgtttttatattttgtttttttggaattttcgttttttagatttttatatggttttttatttattttgttgttttagttgaatgttatttttttaggtagagttttttaaatatatgagttaaagttgggtgaatttattttttttttttttataaatttgatgttttttttttagtgtattattattttttaatgttattttttttgttaattgtatattgggttaatgtttgttttttttattgttgtgtaatttttatgagagtcgggattttttttattttaattaaatataatgatttgaatttggaatggagtcgagtatatagtagttgttgagaaaaataagtgtggtttatatgaataaattagggatttaggaattgattattgtttggattttggaaagtaagaaggggtttaaattttagtatttttttattttgatgttatattagatttttttttttttcggtgtgaaatataggtaaagttttttttttttttttttttagttgtaagaatttatagataaagattaatagtgatttaagaaataataaatttttaaattaagatttatttattttttgtttgggtgcggtggtttaaatttataatttaagtatgttgggaggttaaggttggaggattgtttgagtttagtagtttaagattagtttgggtaatatagtaaagttttatttttagtaaaattataaaaattagttgggcgtggttttttgtttgtagtttttattattttggaggttgaggagggaggttcgtttgagtttgggaggtagaggttgtagtaagtttagattataatattgaattatagtatgggtgatagagttaggttttgttttaaaaaaaggaaaaaattttttttaatggattttatagtgttttgggtttgtgtaagttttaggaatttttggaaatgatgataatatagttggggaaaaataaaaattggaggaagaggtaagtagatatggttaattaaggaaagttgagggtatgacgggtgaatttaggaaatttaagataagattttagtaagataatgagtttttaggatttgtttattgatttttagttttatgagatgtgaataatgtttatattgtttttgtaattttatatagtatatagtttgaatattattaaatttttgatatttgattgtttttgatttataaaaatagaattttatataatttattttacgttagttgaatatttttttgttatgtttagttagagtatgtaggatatgtaggagaaatttttatagaaaggttagaagagatttataataaatattaagtcgggttaggtttttcgaggatgttttaagttttttaggtattaaagaatattttagagatgttttttatttgtagggtgattttaagtattaaagattttagttttagttttagggatttttttttataagaaagatagagtattaagtataatttttgttagagaatttatatatattatagggatataggttttataaatattggagtttagaaagaaaaagaaaggagataatggggaggttattggtatatttttatatttgaggaagaggggttaatattaaagtttttgtggaggatatgatttaggattttttagaagaaacgttttgaattattttgatttttataaaatttttagtaaaaacgttattttgtttgacgtaagttaatataataaagggaagtgttgtatggggaaattattttagtatttttattgttaaattttttaaatattttgaggatatgtgatgtaaaggttttattggtggagatttaaaaagaaatgatttgtacgaaggttttttatatagttttatggattgtgttatgagtaagtagttaagtttttttcgtggaggagataatttgggatttaataatatagatgtataatttttgattaaaacgttataaagttttaagggatatggtttgggtataatgttaataaaattttttattttttttattttatagtagtttagtatttataatgtgcgtttatgtcgggtgtttttagttaaagttagtgggaagtttagtattattagtgttattgttagcgttgttatgtaggagtttttagggagttttagatatattatgttggagaataggaaaggattaggggttagaggaggaggtaagttttatttaggaagaattatgaatttttttatttatattttaaattatggggaggaagttattgatttttttgtttttgggtcgggtaatttcgtgttggagaattaattagtatttgagtttaatagtattattagttgttggttagagatgttgtatgaaggtttttttttgaaatagaatttttttttttaaaggattgtttttaaattagtgtttgaaagatttgatttagttgtatgtaaaatattttaattgggttcgattgtgagttagttttgtgttggttagtgatgtgttcgtaagtttgagttttgtaagagtatttattttttatttgataagataattgtttgtagaagtgagtgtgtgagtgtgtttaggagtaaaggagatggaaggaatatggttgtaaattcggagatatttaaattggtttttattgtattatattttaatgttgtagatttgggaaaattattttatgttttatagttgaaatgaaggtattgtgattttttaggttttttaatattggaaaatgttgtgattttgtggacgtttgaaggagtagtagtttcgggtatttgataatatgatagaatgatagttattgattagagagtttaattcgtatttgtttataggtagggatgtttttaataagttaaaggaaattgaaagtttgttaataatttaatttgagtaaaaatattttttttaagtgtgttttttgatgttgtttttaggtttagtggtttttttagaatatatataggtaaggggttaataggggttatttatgtgtaatggagggtttgaaggtggttttgtatggtatttattttaataatgtgataaggttaattgtgtaatttaagtatttatgggtttgagagatcgatcgaagattgtgaaagttagttgtttatagaataatttttttttttttttgagatggagtttgtttttgttgtttaggttggagtgtagtggagcgattttagtttattgtaatatttgttttttcggtttaaagatttttttgttttaattttttaagtaattttgattataggtatttgttattatgtttggttaattttttgtatttttagtggagatgggttttattgtgttagttaagatggtttcgattttttgattttatgttttttttgtttcggttttttaaattgttgggttataggcgtgagttatcgtgtttggttatattatgttttaaaataatgaatattttatgtgaagagtgtttaattttttatttttggtttttattatgatttttttatttgattgaggttatagtattttatattatgttttttttgttttattataagggaagatataagacgattttgttaattaatatattttataatatttaggaaagagaatattagggaaaattatgaattatattagttgatgtaattatgtaatattaaatatattattatatatttagataattattatgttttttattaatataaatataatatttaagatttagaatggattttagaatataattatgtttataaagttttgtattaatttatatgttattatataggtatttatttgttttttttttgtttgtttgtttgttttgagatggagattcgttttgtcgtttaggttggagtgtagtggtattatttttgtttattgtaagtttagttttttaggtttatgttatttttttgttttagttttttgggtagttgggattataggcgttcgttataatttttggttaatttttttgtatttttagtagaaatagggttttatcgtgttcgttaggatggttttaattttttgattttgtgatttgtttgttttagttttcgaaagtgttgggattataggcgtgagttatcgcggtcggtttaaagtttgtaatttgtttttatggagaattatttttgaggtcgtatattttttttagtaataatattgtttaagtaatggtatggcgaagttgtttgtattttttttggagttatattgatattttatttagttaaagtttattttgttttttggaataattgatgtaagatttgatttgtaggagcggttaaaagaatgttatttataaaatgaatgatgtaagtagtaggaaatatatttcgggtttttttaatgtttgttttataaaatgttgatataacgtaggattgttaagtatgttttggggtaaaattttttattgatagtaagaaataggttttttttgattaatagaaggtatagagaaggtaaatcgaggtttattttttttgtgtaatggtatagtgaagaaataatttttaagatgtattattataagaagttaatttttaggaatgattattggagttggtaaattttgttgtaatggatttattggtttaatttgtgtattaattttaagtatgtagtagttattatttttcggatttttttggaataataaatattggtgaattttgggggtttattgatttttttatatgttttgtgttttgttgtttttatattagttgttgaagttgtgttagttttttttgagataggggttattgatttatatatacgggtttgttattggttattttaatggtaaggtagagggtggaggagaaatattaatgatttttattagaaattttgacgatttagtttttttttgttttttttagttattgatgttgggttagttttttttcgtaggaatttttttaaattttttttattttgatattttatgttttttaatattttaaattttgggttattaaagtttttatttgtaagttttatattttatgttgtaagtaagtttcgattttataaattgattgttatatttgtaatataaggttgaaaagtatatggttgtttattcggattaagataaggtaaaatgttagtattttgttgaatatttttagttgtttttatttttattagggatgtggaggttagtttgagagattatattgggggttagtttttattggatattattgatattttagtttttttatttataagttttatgggttatgggatgggatagatagattttttttgtagttgtgtttttaaattttttattttttcgtttttttttttatggagaaggatttaatttgtagggaataagtaacgatcgagtaatatatttttttagtttaaaaatgtaaagattttcgatattaaaattatttgaattttttttttataaatggaattaattattttagggattatagttatgttttgtaagttaagggggtttttgtttaaaattagttttatgtattttgttggtaaatatttttaaatgttagtgggaattttggtaggtttgttttttttaattaatgtagttttttttttggtggggatatttaattttgtattttttggtgtttttgaggtgaggaatattaggaattaatgttttttttgagatttatttttgaagtgggattgtggtttgaattggaaatgtttttattgtttgaggggttcgggtttaggtttttttttagtttttcgatatggggatgttgtttcgatgaaattttgagtagttttgattagtttagtgattttttttgttatagtgaggataaagttttggtgttttttttcgttgggtggggtattgtatcgtaatgttttttttgttttgagatttggcggaatttttttttaaaatgtttagttttggttggatacggtggtttatgtttgtaatttaagtacgttgggaggttaaggtgggcggattataaggttaggagatcgagattattttggttaatatggtgaaattttattttttaaataaatataaaaaattagttgggtgtagtggtaggtgtttgtagttttagttatttgggaggttgaggtaggagaatggcgtgaatttgggaggaggagtttgtagtgagtcgaggttgtattattgtattttagtttggacgatagagcgagattttattttaaaaaaaaaaaaaagtatagtttttttatagttataatatttttttattttagggtttgatttttggttttttttagatttgttaattgttaaattagttattgtttgtattaatattgtagagcgatgaagtttagtttttatattttgataagttttgagaaaattttttaagttttttgtatattttataggtgtcgatgtacgtttataatttgtatttgtatttttaaaagttagagttaaggttagtattattgtagttgcggtgtgataaatttgatgttttattgttttttatagttatgtaagaaattgtgtataaggtttttgcgatttttgtatgatatgtaaaaaggattgtattgggatttttttttttggaattgtggtttagttatatttagtagtttgtgtatattgttggtatttgggagtgttatttgatgttttaggtttgaataagggttattatttaagagtatgttttttgtaatgtttttgtgtttagttatataatttcgtttagttttgtttgtatatattttttgttaatttaaattttatgttaggtatgtattaggagataaataagtgtgagttaaattttttatattgaagggtagaaggtatatagtattaaatatagatattagtaattttaaagtgaataggttttgtatattattatttattatattttttttaatttttttaataatttaaattttagtggagtgtgtttatgaataagttgttatggattatttggattaggttttatagaaataggaaaagtgtaaggtttttagggttttttagttatggtagtagagtgtaaaattttttgtattggggtttttatttttgttatcgaaggaggtagtatagatgtttttgttattggaggaggtggtataggttaatttttatttttttttttttgttttttatttttaattggagttgtgggtgggataatagatttttttagatttttagatttagaatattatttttgttgtttagtagaataagaaggagataatggtagaaggatagtatggattaaattttaagtggagaaaacggaaggattaattttgagatttttttattgagtttgttttaatttttttgttttgttttaattttttatattaagagtgtttgtttgtgggaattatgggttatgtataataattttttgtagtattgtagttaatgtttgagatttaatttgagtattagattattttaataaaattttaagtaattgtatataatgtttttttttaatagataaattttgttttacgttattttgatttagaaaatttttcgtttttaatatttttttagagtattgattttatattgtttttagtatttttttagggtattgattttatattagttgttagtagatttatttcggggtttttattcgttttgttaaatttagtttttttgttttattagattttttttgtttatatttttatgtttttgtgtttagaaattattatggtgtcgttttgtcgttgtttgaatattattatgttatggattttgttagattgaatataggaggatgaacgtggaaataaagataaaagagtatatttggaagaaggggttaggggtattttgttttttgtgaataaaggttttgagttttgagtttttttcgtatttattgagaagagatagtaagaagggggttattgtcggtttgttgtttgttttagagtagttttgtaagattgtattttttgaataatagattttagatgttttagtagataatttgaaggagtttagcgttagggagtgattgtttttagtaaattttttggtggttagtatagaggagagtttgtttttgttttgtatttatgataaatagtttgttgtttgattatattgttttagtggaaattttgagttggttatgattttttagttttcggttttttatattgaatggatttaataagaaagtggttgaatttatgtaattgtttagttatttataatgaaataagtaaaaattaattataaagaagtgaattgggtgatgattgtataaaagatgtgagtttaggttaggtatggtggttttcgtttgtaattttagtaatttgggaggttgaggcgggtagattatgaggttagaaaatcgagattattttggttaatacggtgaaaattagtttttattaaaaaaatataaaaaaattagttaggcgtagtgttaggtatttgtagttttagttattcgggaggttgaggtaggagaatggtatgaattcggaggtagagttggtagtgagtcgagattgtgttattgtattttagtttgggtgatagagtgagattttattttaaaaaaataaaataaaataaaataaaataaaaagatgtgagtttagattttttagaaagagtatagtgtgaattagtgtttttaattttagtattattgatattttggattaggtaattttttgttggtgatggaggttgttgtgtatattgtaggttttttagaagtgtttttgatttttatttattaaatattagaagaaatttttgttgtgataattaaaaatttttttaaatattgttatatgttttttaagggtgatgggagggaagggaggggtggtgaattatttttgggtaagaattatgggtgtgaattatttgaaaaaatttgtgttgaataagttattattagttatggagtagttgagaattattttgaaaaatatttgttgaaaattttggttttatagaaaatgaaaatgttgtagaattttggttttaatatagtgttatgtttttagaaaatgaatttgtggagaattaagatttattgatttttttgtttttataattagttattaaattatattatttattttttatagtatttttttttttaatttttgtgttattggtttattaattatttgtagtaatgaattataattagagttattttatttttatttaatgttcgaattaatttattttttttagttttttatttttaataatattagtaggtattaaatttttagttttggtttgaggtagaattttcggttttgtagttaattttttttagaaagggagaaattaagaaaatgatatttttatatagatagtttgtaaaaatgagtaggttttagattttgagtacgatttttgtaaagttttttttgttttttagaaacgatgttttggattaaaaacgtttgtttttttatttttaaattatttaagtattttttttatagatagaaagttaaaaaataaatatgtgtgaagtcgttgttattgtggtttgtatgattagtattgtaatttatgtttatgtgttttagttagggttaaaaggtttggtaaataaaattagaggatgtttatttaaatttggatttttaataaattatggtgtgtatttgaaatttagatttaattaggaatttgtattttatttggtagttttaggttaatttgttagttaaattttagaataaggagtgatttaatatttttttgtgttttttaatatatgtttaggataggtatatagaatttttaaaatgataaatgtaaaatgaatgaaagttttttttatatattggaattagtagtttttgtatttttgtttttattttaagaaataatttgatatatatgaatattaggaattttgttaataatttagatataatttggttattatttattaataatgggtagatttttaatttttagaattagagaatttgaatagaaatataattttttttatttgggttaatttttattaattaaagtttttttgtaatttattaaatgtatttaataatagtattatttttataggattatttttaagtgtaaaattaaataatgattttttagtattgattatataataaatatttaaaaatatttttattttaattttttatgatttttttaattgtagtttatattattttttttattttttgattttaaagtaattagtatttttattatgattttgtaattgttttttgtttttttattagttttataaagaattgttattttgaaaatatagggtagaaatattagtttatgtttaataatgtagtatatttaaataaattttatataaaaggtatttgttgatataggagaaagggattttttatatgtttagatttaaattgtaatttgatttttagtattatatttgggatattgggttttatttatatttttttaattttagattttagagatgtatatgtttttaaatattatagataaaataggattattattgaaattgtatattgaaaattaaaggtttggtatatagttattgtaaaatgttatatggtatgtattgatggagattagatttattttatttattattttatttttatgatttagagtagtagttggtatattttaagttattaataaatatgggttgtgtgaaatattggttgtgtgatgttttgtatgaatatttattattgtatatagggattttttcgtatttttttgttaatgatgattgagtatttttggtttatagatttttttgtttttttttagtttttttagtttttttttttagatttagttggttttttgaatttagagcgtagtttttttttgaagttttttatttagaatagttaattttaattttatttttatttttatttgttttttaaatggtttaatttattttttattttggatattttattgattgtaaatattaattttagtaaatttagtatttgttttttttttatatttttattttatttatttaatgatatttattggttttttttcgttttttgaaaaaaatttgttttttttgatttataagtattatgtttttttggttttttttttatatttttggggttttttttttgttttttttgttggtttgtgttttttttttttttttatatataagttattattttatgtatttttttttattttttggaatttaatagagtatacgtattgatgttattaatataaatatttttagttttggatttatcgtgagttttttaaattttattgattttttgattgttttatataaacgttaataaattatttttaattatttattttaaataatttttttttatagttttttttattttaataaataatattattattcgtttatttgttaagataaaatttttagaaataagtttgattgttttattttttttatagtaatttattaataagttgagtaaattatatgtcgagtttatttattttattttttttattgtttttgttattaatgtatattaggaagttatgagtttgttttttttgaggattttttgttgtgtttttaaatagtttttttgattatttgtgaattttagcgatttaatttttataaagtaattagaattagttttaaaaattgaatataaatggattttttttgtaattatgtagtagttttttatatttgtttaaataaaattaaaattttttattaagaatattagggtttaatatgatgaggtttttgattttttttttgtattttattttattttttgtttttttatttttttgttttttataggttagtttttttagttttttttttgtttttgtatataattttttatattaggattttttttatattttgtttttttggaatttttgttttttagatttttatgagtgtttatttattttgttgttttagttgaatgttatttttttagatagagttgtttaagtatatgaattaaagttgggtggatttaattttttttttttataaatttgatgttttttttttcgtgtacgatgattgtttgaaatttttttttttgttaaatgattattgggttattgtttattttttttatgattgcgtaagttttatgagtagggattagtttattgtattttatttaaatagaatgatttgaatttagaagggagtttagtatatagtagttgttgataaaaataagtgtggtttatattaataaattagggttttgggaattgattattgtttggattttggaaagtaagaaggggtttaagttttagtatttttttattttgatgttatattagatttttttttttttttgtgagaaatataggtatacgattatttttttttttttttagttggatgaatttatagataaggaaatagtaatttttttttttttttttttttatttttgggatggagtttagttttgtcgttaggttggagtgtagtggcgtgatttgggtttattgtaattttcgtttttcggatttaagtgatttttttgttttagttttttgagtagttgggattataggtatgtgttattatgtttagttaatttttttatttttagtaaagacgggttttattatgttggttaggatggttttgattttttggttttatgatttgtttattttagtattttaaagtgttgggattataggtatgagttattgagtttggttaaggaaatagtaattttaagaaaaaagaatttttttttaaattaagatttattttttttcggttgggtatgttggtttttatttgtaattttagtatgttgggaggtaggaggatcgtttgagtttaggagtataagattagtttgggtaatatagtaaaatgtagtttttattaaaattataataattagttgggtgtggttttttgtttgtagttttagttattttggaggttgaggagggaggattatttgagttttggcggtagaggttgtagtgagtttttattatattattatattatagtttgggtgatagagttaggttttgttttaaaaaaagaagaaattattttttgtgatgaattttatagtgttttaggtttgtgtaagttttaaggatttcgggaaataatgataatatagttggggaaaaatagagagaaattggaggaagaggtaagtggatatggttaattaagaaaagttgacggtatgatgggtgaatttatgaaatttaggataagattcgagtaggataatgagtttttaggatttgtttattgatttttagttttatgagatgtgaataatgtttatattgtttcggtaattttatttagagtatatagtttgaattttagtaaatttttgatattttattatttttgatttataaaaatataattttatataatttattttatatttattgaatttttttttgtggagtttagttagagtatataggagatgtaggagaagttagtatagaaaggttaaaagagatttataataaatattaatttgggttaggtttttagaggatgttttaagttttttaggtattaaagaatattttatagatgttttttgtttgtagggtgatattaagtattaaagattttggttttagttttacggatttttttttataagaaagaaagagtattaagtataatttttgttagagaatttatataagttatagggatataggttttataaagattggattttagaaagaaacgaaagtagataatggggaggttattgggtatatttttatttatgaggaagaggggttaatattataggttttgtggaggatataatataggattatttaggagagattttttgaatttttttgatttttataaaatttttagaaaaaaatttttttttgtttgatttaagttaatataataaagggaagtgttgtatggggaatttattttagtatttttatttttaaattttttaaagattttgaggatatgtgatgtaaagttttattggtagagatttgagaagaaatgatttgtatggaggtttttaaataagttttatggagagggtaagtagttaagttttttttgtggaggaagtaatttgggatttatgtgataaagatgggtaatttttgtggaaaacgttataaatttttaagggatatggattgggtatagtgataaatttaggtttttattttattttttttatggtagtttagtaatcgtagtgtgtatttaggtcgggtgtttttagttaaagttagtggggagtttagtattattagtgttattgttagcgttgttatgtaggagtttttagggagttttaaatatattatgttggagaataggataggattaggtgttagggtagtaggtaagttttatatttacggagaattatgatttttttttatttatatttttaatatagggagtaaggtattaatttttttgtttttgggttgcgtaatttcgtgttggagaattaattagtatttgagtttaatagtattattagttgttggttagagatgtagtatgaaggtttttttttgaaataatttttttttttaaatgattgttttaatttagtatttggaaggttggaattagttgtatggaaaatattttaattgggtttttattgttagttagttttgtgttggttagtgatgtgtttataagtttgagttttgtaagagtatttattttttatttgataagataattgtttgtagaagtgagtgtgtgagtgtgtttaggagtaaaggagatgaagggaatatggttgtaaattcggagatttgtaatttagtttttattgtattatattttaatgttatagatttgggaaaattattttatgttttatagttgatacgaaggtattgcgattttttaggttttttaatattggaaaatgttgtgattttgtggacgttttaagtagtaatagtttttgtgtatttgatgatatgatagaatgatagttgttaattggagagggtattttgtatttatttttaggtagggatgtttttaataagttaaaggaaatggaaagtttgttaataatttaattttagtaaaaggttgtttttaagtgtgttttttgatgttgtttttaagtttagtggtatttttagaatatatataggaaggggtttgtagggattatttatgtgtaatggagggtttgaaggtgtttttgtatagtatttattttaataatgtgataaggttaattgggtaatcgaagtatttaggggtttgagagattgattaaggatttaaagttagttgttgatagaataatattgttgtaaaataattaatattttatgtgaagagtgtttaattttttattttggttttaattaggatttttttatttgattgaggttatggttttttattattatgttttttttgatttattataaggaaagatataagaagattgtgttaattaatatgttatagaatgtttaggaaagagaattttagggaaaaattatgaattatattagttgatgtaattatgtaattttaaatatataattttatatttagataattattatgttttatattaatataaatgtgatatttaagatttagaatggattttaaagtataattatatatataaagttttgtattaatttatattgtattatagttgagataggtattttttttttatgtgttttagtgtttttaggagtaggatttttattatgttgtaataaaaatgagtatttgattttgtatttagaattgtattaaaagttttatatgttttatatttttatttaatttttatattagtttagtaaaataaatatcgtttttatgtttataggtggagagattaaaacgatggaaataaaataaattttgttaagatatattagtaaatagtatattatagattgagttaaattatatattttttaagtttagttattagattatatttttttagaaagaaggggaaaagtaaaagtaaaagaaaaaagaaataaatttgtgaaaaaaagaaattaattgtgatagtagtaatttaggaaatttagttaaggtttatgttagtattttaggataaaagggtggtgatgttggcggtggcgagttgtttagagtggtcggttgttgcgggaagttgtaagcggtggcggtaggagttattgagggagtagtggtcgtggtgggatttttgtgttttatattttttgtgtttcgcgttattgaggtagttgattgtattgattttatttttgagtagttagtaggatcgtttttaggtttagagtttttattatttttgcgttgttgttttcgttttgtagttgtggggagggtatggagttggggttattttttagtgattcggggtgggacgtgggagtggttttattttgaggattcggttagcggtaaggtcgttgtttcgttttgttaagggcgtttagtttttgcgttttaggaagaggttttgtttgaggtcgtttagggttttgttttcgcgggtggttatttagtttgatgtttttgatagttaggttcgggttgtgatttgttttttaaggtgtttttttcgttttatttaggcgagaaggagtttcgggtattttgagtgttagtagaataatttgtagagatattatttttgttttatatgttggtttgcgtttagcgaggggagttgtttattttaggttgttagaaggtgtgacgggggatatttgtaggttttacggaatgggttggaaattttattttttcggtttttttcgtaggtagtaggatttaggtttttttatattttatttttttaagattgagaaggtttttttgtttatgtaggtttgggggtgtttgtttttattttttggttttttttttggttttattcgggttttaggtgtttattttgattttagagtggagttggggtagagttttagtgttgttatagattggttgggtgtgtgtacgtttagggaagtgttgatatattagttttttgttattttagttatagggaagttaagggaagatgggtatgtaatatttgaagtaagttttttatagggagtatgttgaagagttattgttttttattttggtatttgtttttttatatattttatatgtaatgtagttattaatatgtgagtttttatgattgttatttgttttttgtttttttttttgttttttttgggttttttttttttggttttttttttgttttttaatgtgttttttaagtaatttttagaattttatttttaaattaatttttttttggtgtattttattgtatagtttttgtgatttatttgtttgttaatataatttattatagtttattggtgttgatattttattagtttgattaaagtgtggaaattttattttttttatatttttttttatttttgtatgtgtaatatgtatgttttattttttttatttgtattaaaattatatttgttaatgttgtaatttttgttttaattattaagttaatttataaaattgaagaagtttgttgtatttaattatatttttatttatttgttgtttattttttttttaattgtttaagattttttttattattatttttattttagttaaagtattttttttagtttttgttttaatataagttttttagtatgaaatttttttgatttttttttttttaagtatgttatggttaggcgtagtggtttacgtttgtaattttagtattttggaaggttaaggtaggcggattttatgagtttaggaattcgagataagtttgggtaatatggtaaaattttgtttttgttaaaaatataaaaaattagttaggcgtggtggtgtgtgtttgtaattttagttatttaggaggttgaggtgtgaggattatatgagtttgggaggtaaaggttgtagtgagttatggtcgcgttattgtattttagtttgagtttttttttttagatggattaaaattttatttaaaaaataaaaaataaataaaaaaagaaaagtaaaagaaaaaaaaaagttatgatagaatattttataataatgtttttattggatatatattttaggttaatattttttttagttattaaaatattttgtgttatttttgtttggtttgtttgatttttaatgagtaatttattgttatttaatttatttttttttgtgtatgagatgtttttttttttttgttgttttcgagattttttttggtataaatttttttggatttatttttatttgggtttgtatagatttttgaatttttatatttaagtttttgtttaaatttggaaagtagttagtttttttttaagtattttttgggtattatttatttgttatttttttttaagattttagtaatataaattttatattttttgttataattttatagatttattagtatgaaattatattaaatattatgaaaaattttataaaataaatatgtatgtaataaataatttaaaatgtataatgtattgtgtatgtaatgaataaattatttaaaatgtataatgtattgaagttgataaatattataaaataggaagatttttatattttatagagaaagtaagtttattttataaagtttttttaagataaaattttaggtttatttagttttaataattatttaaaaatatttaaggaataaataatattaattttatataaattttaaatatatttggaaaaaggaaaagtatttgtaattacgtttgatgagatttgtgtaaattttattttaagatttgaacggatttttataacgaataggaattaagagattaataatttttatgagttaagtttttaaggaaatattagttaagtgaatttagtgatatatggttattatattatgattaagtggaggttattttagaaatgtaaggttgtttgagtatttgagaattaattagtgtgatttatgatattaattgaaggaaggagaatatatatgtaattaattggatagagttatgaaatacgatttgatagaatttagtatttggttttaatttttttttattttcgttgtgtttttgtttttattatgtgatatttaggttttttttttttttttttatgattgttagttttttgaggtttttattagaagtaattgttagtattatattttttgtatagtttgtagaattttgagttagtgaaattttttttttttatgaattatttagttttaggtatttttttttggtaatgtaagaatggattaatataattatgttttattatgaataaatagaaaataaaattaagaaaataattttattaatttttttatttttttgttttttttttttattttttttaatttaaatttgtttttttttattattaaaagtttatatttttgatttttatatatttatttttttataatataggtatttaaaattaaatatttttttttaaggattgttttggttgtatttcgaaaatttttaaaatttattttaatattattttatttaaaattattttttaatttttttttgattttttttttgataagttataaattatttagaaatgtattattttagttttaaaaatttaggtagtttttttaattttattaatttgtaatttgataagattgtgtttagagaatatattttgtatgattttatttttgtaaaagtattgagtttagttttatagttatagtatttgttttattttatgaattatttttgtgtaatgtaaataaataaatattttgtagttattagatgttgttaatttatgttaattataaatgttaattaagttaagatggttgaaagtattgtttttattttgattttttttttgatttttgtatgaagttagagagatgtttgttgttttttgtttacgtttttagtttttatataattagtatgaagttagaaaaagttttggaaagagaattagttgatagggtaaagtagatatgtattatttaggggttttttatagattgtaatgtattatataagtttacggggttatttataatttagttggtttgtttttgtttttttataattttttttttttagttaggtttaattttttatttatgttaagatttagtagatggattaaagaatgagagtggatatttgtttttgtttatttaagtgggatttgtttatttttggaatttggaatttttatattttttgatttacggttggttaaaattttaaaaataagattattttttagtttatttatttagtttagtttatatatttttttgtttttatagtaatagtgataatttttataattttttatttttttattgtattgtggtttaatattttttttaatttatgttgatagttttatataatttatttaaagttttgaatattttttttttgtatggttatattatagtttattttttttatatttaaatgtagagaatgtttttttttttttttgttatattttttttatgttattatggatatatgaggaagaatttattgagattgtaataatttagagtggaaatattgtattatttaaattatttatagggttatattaatatatgtttatcgtgttttatatagtattagatgttattttgtagtgtgttgttatttcgtatgttgtatagtttttaggatgtataaaatttttataattaagataaattaattagtttttttttttgaatttggaaatgtttttgttattttaaatcgtggtttaataaattattaattttatgtttttttgggtttatgtaggattgttttttaagacggatgttaaaatgagatttttgttgtttttattagtatataataattgtattttgagttttaatagatattattatattgttataatttaaaattttaataatatgagagagtttatttttttagaattttgattttaaaataaattattgtatttgttaattgtggagtgggagaaatagtttattatattgttgtttgaatttggatttttttgtttattggtgcgtttgagtaaatatttatatttatcggttattagaatatttttttttatagtgagtttatattttttgtttaattatttatggtatttttatgaatttatttattgattagttaataatttttttaagaaagttagtttattgtttgttttatatgattaaattttttttgagcgttatatattttttttaattttgttattttttttatgtaaataaattagtaattttttttaaatatttttttatttgtattttttggattttattttgtttataaagttttattttttaaaaaagaattattttaatacgtttattaaagtataatttatatattataaaatttatttattgtgttatagttacggtttggaatattataaaatttatttattgtatatgtaaaattgaatgatttgagtaaattaatagatttgtgtaattattataataatttatttttagaatatttttgttatgttttaaatttttttatttatagttaagttttattgagattttaaattttaggtatttagtgatttgtttttgtgtttataaatttattttttttagatattttaagtaaatgaaattatatgatatgtaatttttcgtgtttaattttttttatttagttaatattattgaagtttataagttttgtagtatgtattattattttgtgtttttatttttttttgtttttttttatgtgtgtaaatttataaggtataagtgtagttttggtatttgtatagattgtatagtggtgaagtcggtgtttttatagtatttattatttaaattatatgtattgtatttattaagtaatgttttattattcggagtgtaagggtggaaatttgttttgggaaaattatcgtgatgtttatggtattttcgttgttagatgagtttagttttgtttttttttattgttgaatgatattgttttgtttggatgtagttgaattttgtttatttatttattagttgaaggatatttggattgtttttagttttggtttattatggttaaggttgttttgaattttaatatatatttttgtgaggatatacgtttttatgttttttaggtagattttaaggaatgagattgttgggttataaggtaaatatatgttaaattatttaagaaattgttaaattattaggtatttgtaaatttatatatttttattagtaacgtataagggtttagaaagtttatttgtttttaaatataattataatgatgatgatagtattagaaataatatttgttttggtaattttatattttttttttatgttttaagttttatttatttaggatttatttagtgaaagaaatgagtttggaatataatttataaaaattgaaattaaattttaattttttttgtttttaattgtagattttgttttattaatatatttaattaaaaaaattagtaataaatgtatttttaaaagtaaatgtatagtgtgttttagtgttttatagagttatttattttttattttatttttttttaataatttttttggaaaatatatttattttataaaataatatgttagaatatttaattgagttttaaaaataattttatttgtttgtttttttgttttattgtaattgagttaatggttgatatttaataattttttttatatgtgtgtgtgtatatatatgtgtatatatgtgtgtgtatatatatatatatatatatatatatttgtatatgtatgtgtgtgtatatatatgtatatatatatatatatatatatatatagatatatatatatatatatatatatatatatatatatatgtatatatatatatatatatatatataaagatttaaaattttgaattgagggtgtttgttaggaatttataggttttcgtgtggaagttaatttaaatatttacgatttgatagtattataatttattatttttttattttgaaattaatttttgttattttagttattatttttttatttttaaaaatatttgattttgttttttttttttttatgtgtattaggtcgattttgtaaaggttgtattttggtttgtttgagttcgtgtgattttatagtcgttttaatgtatgagaaagtgggtattgggaataatttggaaatagtttagttgttttttttaaaggtatataggagaaagaagtattttttttttgtttttgggagttgttgtgaatgaataataaatttaaagttgttgtaggggttattttattattttaggaaagttgagatattgtgtgtgatagagagatgagttatgaagttttaggattgttggtgatgttattggtttgttgagttgagtaattttgaagacgtttagttttggatttattagttatgtgagataatgggttaaagaaaaataaagtttattagatgtaattttttgttattagtagtagaaggtatttttattgaaatatttattttatatattttggttttattttgtaattttatattacgagttttatataaaatgagaaaattatttttttaatttaggaaatgaggtttttttgttgtatttttgtgattaaatagaatagatataattattagtttaatatatttttataggatttatatttttataggatttatatgtatttgtattgttatttatgtataagtaatatataattaaaaataaaatatgtataaaaatttttgattgaaaataaaataatagtcgtttttgttagtggagaaattatgtttaaatgattattattttgaaatagatttttgaattatgtatttttatatttgatattttatattgatttttaggtagaatataatggagattttatttttcgttttttaaatgtgtttttttttgaaatttgtataggttttttgataatattatattattgaagtttttggagtgaaatattatatattaatttatagttataaatataaaatattgtagatggggtgaagatttttgattgatttgttggttggttttttatttggtttgttaagtttgttttagttgttatagtttgtttttagtttttatgtattgtttttttaaatgttagtattatttttttaattgataagtaaaaattgtatagtatatttatgtggaagtatgaagttttgttatatgtttatagtgtggaatgattaaattatggtatttaatatatatattattttatatatttatgatatatacgtgaaaattattattttgttaggaaataattttttttttttttttttttttttttttattttttgtttttggagttaaatggattagatgatatttaattttatttttgagaaatatttaataatgtaatgtgtttgtggtatagggtgagtatagatgtataggaggttatagggtttaggtaaaggggagtataaaagttgaagatgaggcgttgttattaatgttgggattttaggttaagggtaggaattgaggaagttataagggaggatattttttgtagttgttgaattagtagtaattaggttttgagaaagttttttttcgtggaagaataatagttaggcgggaaagttttttattttgtaaagttggggtagaagatttttttttaaattgttatttgtattttagtttaggaattttgtaaaagatagaggagagtgttgtttttaatttggttttattaacgtttttttttttttttttgaaggatttagatgagaatattgtaggaagaagaaaaataagtttttgagttttttagagttaatagttttgtagagtataggttttttttaagtggagaggaggagttttggtgtaaattgtttgattagaaatttggatttaaagttttttttattatttttgttttatgttttattatttttattattattttagtgtgttttgagtttgtttttttcggtaggtttagggtttggttgattttaagagtgaagttatagatttttgtagtgagtgttatagtttttaaaggtggtacggatttaaagagtgagtataagatttattgtgaagattaaaagaataaaatttttatagtatagaaaaggatttaagtaggttgtaggtgttggttagggtgattagtttttatttttttatttgttttcgttcgtattttgttgattggtttattttaaagagtgttgattggtttattttatagagtgtggattggtttattttatagagtgttgattggtttattttataaatatttagcgagttatagagtgttaatttttatagagtatttattggtgtgtttttatagagtatttattggtgtatttagaaattttttgtaagatagaaaagttttttaagtttttatttaatttagaagtttagttggttttattttttattggagaaattgaatttgtgtttaaaagaggattaaaaggtattatttgttggttgaagtttagagtgttttgggaaaaagaggaaaagatatatatttaaaagatattgaagtaaatttgttttttaatataatattatagttttagattttttatcggagagttttaatattaaaatttatattaattagggtagagaggagtagaaatagattatgtgatttatgaagtatgaagtgtttgttataggatttagtgtaattttattaattttagtggtttttttttaatttgttttaagattttaaattaaaggatttttatttgttaattttttttttgtttttgtaggttataagttattatgtttttatatagtaattatgtattgatgatttttggattagtaggatattagagtcgtttggggaaagaaaggttttatttagagttatttatatattgagaattaattttagtaaagttttatttttttttgtagaaaagtttatggaaaggtttagttattaaaggttttttatttttttgatttttgaagtagatgaatagttcggttttaaggaagagtaggtttagtataaagttttcgattttatttagtattttgttttgtgtagatttagatcgtgtttttgagagaggaagttaggtttagtgatgtttattttaaattgaatttttttaattgagattttaagatttagagttttgaaaatggggaagaaggttgttttataagaattaaaataattagttattttgggagaaaaaaaggattttaaattatattgaatagttataaggtttcgatattaaatttatttaaatattatagttttgatgtaaggtaagcgtttaatatttgatttatagaaagtttgagatttagtgaggttaagtagtttgtttagagtgatagagttaataaaaggtagagttgagattggattttttttatgttaggtaggtttttatgttttttttttttttagattaaaataagtaatttagagtagtagtattagaaatttagttttagatttagaagtagggtttggagtttggggagatcgggtgattttgatttgtgatattatggggaggtttaaaaaaaaaaaaagtatgattgattttatagggagtataggtgtttttatatattgttatagggttatttttagtgatttgtgttgatggagatgagaatatggagtaaatgaaaataggacgtgggagaggagaaatttgatatttagggattagtatagttttttttttggtgggtgagaaatgtatgaaattagaaagttgtttattttattttattgtgagagcgttcgttacgtttgggtgttttatttggtaagtgtaaatttttttatttcgaggaattgtttttagtattattagggtttggaaggtttagtttttattttggattaggttcgtggatattattttagttttttttttttggtcgtttcggaattatttgattttaatgttgtttggatagaaattatttatagagtagattaggaggttgtggtgttgtaggggttgggtttttgtaggatatatagttatttgaggatggattaggagaaaaaaaggtagagggaatgagttaggaagatagagtaattttgttggtttggttgtttgtttgtttttttgtaaatttaggttttgattttgattaggtttttagtatagttggttatgtggttttatagtgttattagtttggaatttaattttgatagtgaggatttattagatttgagagatgtgaaaaattgcgtttgtttttttataatttgaaattggtatgtattgttaaagtgtttataaatttttgaaagtatagagtgtagtaattaaaattgatatttgagttaggttgtatggtttaaatttaaggtttgttttttattggttgattttggaagagttgatttttttgtgttttaattttgttatttttaatgaaggataattatattaatttattttttggggttatatgaggattaatttatgtaaaatatataatgattgaagatagtttttaatttatgagattagaaagttttttattttattttatcgtaagggggtttattatatttgggtgttttatttggtatttatttattatttttgtatatcgtgatagaaaaatatgatttaaagtaatgtatatagataaagggatagagttgggtatatgagaaaatcgagtatgaatttttaggaatattattgttatgtatttatattttagaatattatagaaatggttttgtttttgggaaggtgggatagatagaaatgattttttaaatttttacgtttttagaaaagtatgagttttaaagtagatagaaggatttaggagcgttattttagttttgaaagtttttatatttttatttagttgtttaatgtatttttcgtgtaatataagtagaattattattaggttaattgtaaaatgatttttttttttagaattatatttggattaaggtagggtttggaatttattatttgtggtgtttatgtttaggaaaattttcgatattagtatatttttaataaatataatgtttttagaagtaaggagaaatttagagataaaaatattataaaatggtagatttaagatggattgtaaattattaataaaatttttgtaatatattttattaaataaaaatgtttaaatttttaatatggaaaagaatttttaaaattaatatataaattataaattggagtaaatgttgaattaaatattaataaagtgttaataattttatagtataaagaatttataaagttattgagaaaaatattaagttttagagatattaggtagtagattattgtttattatttattaaataaaatagggaatttttagagtagttattaaaattgattaataaatcggttaaaataatttaaaagaatttttttgaatgaaaaatagatttttttatatttttttaaatgaaaaaatataaattaaaaattaattagaaatatatatttttaatttttggtgaatgttataataaaggttaataaaggggaaagtgatttttaagttgtgttataattattatatataaaagaataatatgtaattattagaaaattattagtattataataatatagtaattgtgttaaaattttaatttaaaagttagttttattgttatttttattatgtaaaaatatatatattagaaaaataaaaaattagtaagaaatttatatttaaagaagttttagaggtgttttagaggtttatttaatttttttagaatttaatttaatgtttttataaatagtacgtatttttattttagagattatatgaagggtgtgtgttagggatagtttggaatcggtttttttatattattttaaattttttttattttttagttttttttttttaaatttttattttatttatatatattttatattttttttttttgtatttttaaggatttaggataattaaggttttttttttttttagtcgttcgtatttattttttttgttatttttttatagaagtttttaaggataagaagtagtttttttttgtttttttttttataataggtatatagatatagattaatttatattttatatatatatttgtgtttttataattgtttgttcgggattgagaggattttaaatgtttatagatggcgcgttttttttttttgttttttttttttttttttttttttttatatatatatatatatatatatatatatttttttttagatttttagtttatagggatttaggtttcgtttttcgatatgtttatttcgtcgttgtattgtgaagtttttattaatttcgtagttgtgtttgtagtaattgtttattcggtttcgtttttgttttaggaggtttttttggttgttttaggattcggcgataggtcgttttagtttcgttatcgttcggtatttttttacgtcgttgtcgaagcgtaggaattttttttggttatggaagtatttgtttaggtatcgtattcgtttcgttttattgaagaaatgatatttagatttacgtagttttaagaaacgtgttgcgggtatacgaaggattcggttatacgggcggttttttgagaagatattgatagcgacgtcgttattcggggttttttgggtggggtgcgggtattgggaattttaatcggttttattcgtaacgtttattatttgtagtttaggagtttatttttcgttttttttaggcgaacgggggtttaggggattatgcgggaaaatttttttttatttttaggtttttgggattttttttttgtttttagtttgttttggagatttttaagtaggagttggaggaggattcgtttcgtatcgtagttcgtttcgtttttttttaggagtttttattttaaagatattttgtttttttttttattttatatgtttatcggttttttaaatagtatttatcgcgtttattttgtgaatatttttttagtgatgattttgtgttaggtttgcgttgtttttaggaatttaaataagggaaaatagatttttttatttcgttgggggagtttaaagagtagtgaaagcgatggttaaaaattagatatataagaggttagataggaatgagaaatttcggaagtgggaagttttagagtagagaataataggatgattttaattatattagggtgttagagaaggattttttgaagagtgatagtttagatgtgatttgataggttaagtaggtgtgagttagggggtagagtggagttcgtgtttgtttggataaaacgggaggtatattttaggtttaggaaattttatgtataaaagtttgaattgatgaatttttttaaaaaattaggagaaagtttattaaagtagagaggttgaggggaaggagggtaaaaggttagtttggagaaattataagaagttaggtattgaaagtttcgtgggtggcgttaggattttggatttatagtaagataatggtaaagtatcgaagagtttaaaggataataaaattatgatttttgtaaatgtttataaatttttttttgtatttttaaatttataaagtttagaaatttagtttaaaaaatttgtttttataatttatttggtaaatcgtatttgataagggtaagtggttaaaggtgttttagagtttttattggcgatatgtgtttttgtagtttttatatatataaatatatatatatatatgtgtgaaaatagatatatatgtaaaatatagtatatatttttgatgtttttgtttttatgtttgaagtgtgaaaacgataaaaataatttaaaaataatttttgggtaaaagtgaaatgagtatatagaagtattttatattgtgaataatattaaatgtagaattattatagaaatttgaggtatgttattgagaaataattttagtagtattattatttgtgatttataagagtaagttgttggaagttaatagagatggtgatgattaataatttatgaaaatgttgaaaaatattgtataaggtaaaaattaaatatgaaaatattaagtttgtattgattaagtggatttaataagaaagtggttgaatttatgtaattgtttaatttttttataatggaataagtaaaaataaattataaaaaataattgtgtggtgagtgtataatagatgtgagtgtagaatttttaaaaagagtatagcgtgaattagtgtttttagttttagtattattgatattttggattagataattttttgttgatggcggaggttgttttgaatattgtaggttttttagtagtgtttttggtttttatttattaaatattagaagaaatttttgttgtgataattaaaaattgttttaaatattgttattgttttttaaggatgatgggagggaagggaggggtggtgaattatttttgggtaagaattataggtgtgaattatttgaaaaaatttgtgttgaataagttattattagttatggagtagttgagaattgtattgaaaaatattttttgaaaattttggttttaggtaaaaagaatgttttgtagaattttggttttaatatagtgttatttttttagaaaatgaatttgatgagaattaagatttaatgatttttttgttttattaagtagttattaattatattatttattatttatattatttttttttttaattttttcgttattggtttattaattatttatagtaatgaattataattatagttattttatttttattaaatgttttaattaatttattttttttagttttttatttttaataatgttagtaggtattatatttttagttttggttagaggtagaatttttggttttgtagttaagtttttttagaaagggagaaattaagaaaatgatattttgatatagatagttttaaaatatgagtaggtttttagattgtgagtaagatttgtagaaatttttttttgttttttagaaacgatggtagagaggtgtttattttggattaaataatgtttatttttttatttttaaattatttaagtatttttttatagagagaaagttaaaatgtaaatatgtgtaaagttgttgttattgtggtttgtatgggtagtattgtaatttatgtttatgtgttttatttagggttgatagatttggtaaataaaattagagggtatttaattaaatttggatttttaataaattatggtcgtgtatttgaaatttagatttaattaggaatatgtgttttatttggtaatttttgtttaatttgttagttaaattttagaagaaggagtgatttaatatttttttgtgtttgttaacgtatgattattatagatatattgaatttttaaaatgataaatgtaaaattattgaaagttttttttatatattggaattagtagtttttgtatttttgtttttatttaaagaaataatttggtatatatgaatattagaaattttgttaataatttagatataatatagttattatttattaatgatggaaaaatttttaaattttataattagaaaatttgaataaaaaggtgattttttttatttgggttaatttttattaatcgtaagtttttttgtaatatattaaatgtatttaataatagtataatttttataggattattgttaagtgtaaaattaaatgatgattttttttagtattgattatataataaatatttaaatatatttttattttaatttttatgatttttataattgtagtttatattattttttgtattttttaattttaaagtaattagtatttttatgattttgtaattgttttttgtttttttatgagttttataaagaattgttattttgaaaatatagggtagaaatattggtttatgtttaataatgtagtatatttaaattttatataaaaggtatttgttgatatagaagaaagggattttttatatgtttagatttaaattgtaatttgatttttagtattaaatttttaatattgggttttatttataattttttaattttagattttagagatgtatatgtttttaaatattatagatatagtaggattattattgaaattgtatatagaaatttataggtttggtatatagttattgtaaattgttatatggtatatattgatggcgagcggatttattttatttattattatttttatgatttagagtaataattggtatattttatgttattaataaatattggttttgtgaaatattggttgtgttaaatattggttgtgtgattttttgtatgagtagttattattgtatataggggttttttagtatttttttgttaatgattgagtattttttgtttataggttttttttcgtttttttagtttttttagtttttttttttagatttagcgggttttttgaatttagagtatagtttttttcgaagttttatttaaaatagttaattttaatttcgtttttatttttatttattttttaaatagtttaatttagttttttttttggatattttattgattataaatattaattttattaaatttagtatttgtttttttgttacgtttttatttttttttttgtttagtggtatttattataattggttttttttttttttttgaaaaaaatatattttttttgatttatacgtattatgtttttttggtttttttttaatatttttgggttttgttttagtttattttgttggtttgtgttttttttttttttttttatataatttatttttttatgtatttttttttattttttagaatttaatatattatacgtattgatgtcgttaatataaatatttgacgttttagttttattttattatgagttttttaaatgttattgattttttgattgttttatataaatgttaataaattatttttaatttaaataaaatttttatttttaattatttattttaaattatttttttttatagttttttttattttaataaataaaattattatttatttatttgttaaaataaaatttttaggaataaatttgattgttttattttttttatagtaatttattaataagttaagtaaaaatatatgttaagtttgtttattttattttttttatcgtttttattattaatgtattttatgaagttataagtttgttttttttggagaattttttgttgtgtttttaaatagtttttttaattatttgtgaattttaataatttaatttttataaagtagttagaattaattgtaataattgaatataagttgggcgtagtggtttatgtttgtaattttagtattttgggaggtcgaggcgggtggattataaggttaggagatcgagattattttggttaatacggtgaaattttatttttattaaaaatataaaaagtagtcgattgtggtggtatgtatttgtggttttagttatttaggaggttgaggaaggataattttttgaatttaggaggcggaggttgtagtgagtcgagattgtgttattgtaatttagtttgggtaatagagtgagattttattatatatatatataaaagttgaatataaattgattttttttgtaattatatagtagttttttatatttatttaaataaaatttagttcgggggtggtggtttacgtttgtaattttagtattttgggaggttaaggtagatagattatttgaggttaggagtttaagattagtttggttaatatggtgatattttatgtatattaaaaatataaaaaaattagttaggtatggtggtgggtgtttgtaattttagttatttgggaagttgaggtaggagaattatttgaatttaggaggtggaggttgtagtgagtggagattgtgttatggtattttagtttgggtaataagaatgaaattttattttaaaataaataaataaataaaatttaaaaataaataaaaataaaataaaatttaaattttttatcgtggatattagagtttataatgatgaggtttttgattttttttttgtgttttattttattttttgtttttttatttttttgttttttatacgttagtttttttagttttttttttttttttttatataattttttatattagtgttttttttcgattcggtttttttgaaattttcgttcgttagatttttatgattgtttatttattttgttgttttagttgaatattatttttttaggtagagttttttaaatatataaattaaagtagatgaatttattttttttttttaatatatatttgatgttttttttttagtgtattatgattttttaatattattttttttgttaaatgtttattgggttagtgtttgttttttttatttttgtaatttttttgagagttgggattttttttattttaattaaatagaatgatttgaatttagaatggaatttagtatatagtagttgttgagaaaaataagtgtggtttatataaataaattagggtatgggaattgattattgtggggattttggaaagtaagaaggggtttaagttttagtatttttttattttgatgttatattagattttttttttttttggtgagaaatataggtaaattttttttttttttttttagttggaagaagaatttatggataaaggaatagtgatttaagaaaaaggaaatttttttattaagagttattttttttgtttgggtatattggtttatatttataattttagtatgttgggaggttaaggtaggaggattgtttgagtttagtagtttaagattagtttgggtaatatggtaaaattttttttttattaaaattgtaaaaattagttgggcgtggttgtttgtttgtatttttagttattttggagtttgaggagggaggattgtttgagtgtgggaggtagaggttgtagtgagtttcgatcgtattattgagttatagtttgggtgatagaggtaggttttattttaaagagaaaaatattattttttttagtggattttatagtgttaaggatttgtgtaagttttagagatttttggaaatgatgataatatagttggggaaaaatagagagaaatgggaggaagaggtaagtagatatggttaattaaggaaagttgagggtatgatgggtgaatttatgaaattgaggataagatcgtagtaagataatgagtttttaggatttgtttattgatttttagttttatgagatgtgaataatgtttatattgtttcggtaattttatatagtatatagtttgaatattattaaatttttgatatttgattatttttgatttataaaaatagaattttatataatttatattatattagttaaattttttttgttatgtttagttagagtatgtaggagatgtaggagaaataagtatagaaaggttaaaaagatttataataaatattaatttgggttagttttttagaggatgttttaagttttttaggtattaaagaatattttataagtgttttgtatttgtaaggtgattttaagtattaatgattttagttttagttttagggatttttttttataagaaagaaagagtattaagtataatttttgttagataatttatatatattatagggatataggttttataaatattggagtttagaaagaaaagaaaggagatattagggaggttattgggtttatttttatatatgaggaagaggggttaatattataggttttgtggaggatataatttaggatcgtttaggagagattttttgaatttttttgatttttataaaatttttagtaaaaatttttttttgtttgatataagttaatataataaagggaattgttgtatggggaatttattttagtatttttatttttaaattttttaaagattttgagtatatgtgatgtaaaggttttattggtggagatttgagaagaaatggtttgtataaaggttttttatataagttttatggagagggtaagtagttaagttttttttgtggaggaaataatttgcgattttttgataaagatgagtaatttttgaagaaaattttataattttttaagggatatggtttgggtataatgttaatataattttttatatttttttattttatagtagtttagtatttttaatgtgtttttacgtcgggtgtttttagcgaaagttagtcgggagtttagtattattagtgttattgttaacgttgttaagttggagtttttagggagttttagatatattatgttggagaagaggataggattaggggttagaggagtaggtaagttttatttagggagaattatgatttttttttatttatattttaaattatagggaggaagttattgatttttttgtttttggattgggtaatttcgtgtcggagaattaattagtatttgagtttaatagtattattagttgttgtttagagatgttgtatgaaggtttttttttgaaataattttattttttaaaggattgttttaatttagtatttgaaaggtttgaattagttgtatgtaaaatattttaattggggagttattgtgagttagttttgtgttggttagtgatgtgtttataagtttgagttttgtaagagtatttattttttatttgataagataattgtttgtagaagtgagtgtgtgagtgtgtttaagagtaaaggagacggagggaatatggttgtaaattcggagttttttaattttgtttttattgtattatattttaatgttatagatttgggaaaattattttatgttttatagttgaaatgaaggtattgcgattttttaggttttttaatattggaaaattttgtgattttttagatgttttaaggagcggtagttttaggtatttgataatatgatagaatgatagttattgattagagagtgtaatatgtatttatttttaggtagtgatgtttttaataagttaaaggaaattgaaagtttgttaataatttaatttgagtaaaaatattttttttaagcgtgttttttgatgttgtttttaggtttagcggtatttttagaatatatataggaatgggttaataggggttatttatgtgtaatggagggtttgaaggtgtttttgtacggtatttattttaataatgtgataaggttaagtgtgtaatttaggtattcgtgggtttgagagatcgattaaagatttttaaagttagtcgtttatagaataattttttttttttttttttttttttgagatagagttttgttttgttgttttggttggagtgtagtggtatgattttggtttattgtaattttcgttttttcggtttaaataatttttttgttatagtttttcgagtaattttgattataggtacgtgtttttacgtttggttaattttttgtatttttagtggagatggggttttatcgtgttagttaggatggtttcgattttttgatttcgtgttttatattagtagtgtaattttaaattgttggggttattggcgtgagttattatgtttggttataattttgttttaaaataatgaatattttatatgaagagtgtttagttttttatttttggtttttattatgatttttttatttgattgaggttatagtattttattattatgttttttttgttttattataagggaggatataagacgattttgttaattaatatatttttgaatgtttaggaaagagaatattagggaaaattatgaattatattagttgatgtaattatataatattaaatatattatatatatttagataattattatgttttttattaatataaatgtaatatttaagatttagaatggattttaaagtataattatatttatagcgttttgtattaatttatatgttattatataggtatttattttttataggttttagtgtttttaggggtaggatttttattatgttgtcgtaaaaatgagtattttattttatatttagaattgtattaagtgttttttatattttatatttttattttatttttatattaatttattaaaataaatattttttttatgtttataggtagagagaataaaataatggagatgaaataatttttgtaaagatataaagttagtaaatggtatattatagattgaattaaattatatattttttaggtttagttattatattataattttttatattttatttttgagaataatgttttatgtattaaaattatttatatttttataatttatggatgtatatagtaatatggttatttatgttaatgaatggtagtagtatacgatttgaggaagatattgtgtagtaattttagtttttttaaaagaattattttattattatttttatttttttttggaaatgataatatttatatttattttatgtgatgatatttatagtttttgagaagttttttttttattaaaggtaatagtgattttaaaatttttaaatataaattattgtttagaattattattgtagattttttattataaagtagtaaatttgattattttaaaatagaagaaaaaaagtgttttatttattttggaaaaatatatttttattaatataaaaagtttaaaattttatgggaaaaagttattattgtttttggatttgagaataaattatgtttttatattataataataatttaatattatgggaatttgtgaaattgtaattagaatattatatttaatttggttaatagaaaataataatttatttagaagttaatttaattttagttattcgggaggtgggtggattgtttgaatttggaaggtttacgttgtagtgatttaagattatgttattgtattttagtttgggtggtagatggtagattttgtaaagaaaaaaaaaaaaaaaggaaaagaaagaaagaaaaaaaaaggaaaagaaagaaagaaaaaaaagaaaagaaaagaaggaataaattgtgaaaaaagaaattaattgagatgatggtaatttaggaaatttggttaaggtttagtttagtattttaggataaaagggtggtgatgttggtagtggtgagttgtttagagtggtcgattgtagtgggaagttgtaagcggtggtggtaggaacgattgcgggagtagtggttatggtggaatttttgtgttttatgttttttgtgttttacgtttttgaggtagttgattgtgatgttttaatttttgagtagttggcgggatcgtttttaggttaggagttttttatttttgttttgttgtttttattttgtagttgtggggagggtatggaattggggttaggtttgttgggtttggtttgggaagtgggagtggtttcgttttggggatttagttagcggtatggttattgttttatttattttgttgaggaagtttagtttttgcgttttaggaggaggttttgtttgaggtggtttagagcggtgtttttggggtggttattaagtttgattttttcgacggttaggtttgggtgtgatttgttttattattttatttaggtaaggggaatttcgggtatttttgagtgttaggggaagaatttgtagatatattatttttgttttagatgttggtatgggaataggtgaggggagttgtttattttaggttgtaagaaggtgtgataggggttatttgtagattttaaggattgagtaggaattttgttttttatgtagtaagatttaggtttttttgtattttacgttgttaaggacgtgaagtattttttgtttttgtaggtttgtaggtgtttgtttttattgtttggttttttatttggtttttttaggttttcgggtgtttgttttgattttagagtggagttggggttaagttttagtgttgttatagtttagttgggcgtgtgtatgtttagggtaaagttgatatattagttttttgttattttagttacggggaagttgagggaagatgggttgagggtaattggtgttggtttataggttttttgttatgagtagtttaggtgttatggatggcgttgggaggtagatagttttttgggtagaagggggtaagtttttagtgaagtttttttttttggttagggagggtttgaaggttgtgggttgggttgttagttttgttgatacgagtgggaatttgtgtattttttgggtttgttttatggttaattatggtgtttatttttttttttttgaggtttgtaaaagttttgggtttaggtagagttgaatagaggatggagagagtagagagagaggttagggatatgagggatgagttgttgaggagaggggttattttttttagggtttttttttagttgtagagtgaagttgtttttattagggttttttttttgttgagaattgaggagaggataggataattagttgtagagaggagttattttttttgttgatagttgaatagatgtcggggtaatttggtagtggagaggagttgtttattgtggttttttgagttgttttattgtttaataaagtttttttttgttttgttaattttttatttgtttgggtattttattttttttggacgtaggataggaatttgggatttgtttaatgatgaggttaaaaaagttgtaatataaataggttgtagatgagtaatagagaatgtagttaaatgtagataaatatggaatgaaaaagtaaaaataaatttatattattttatgtaataagattattttttaaaagtagttttaagtggatagaaaaattgtagagaaagtttatggagggttgggcgcggtggtttacgtttgtaattttagtattttgggaggtcgaggcgggcggattacgaggttaggagatcgagattatttcggttaaaacggtgaaatttcgtttttattaaaaatataaaaaattagtcgggcgtagtggcgggcgtttgtagttttagttatttgggaggttgaggtaggagaatggcgtgaattcgggaggcggagtttgtagtgagtcgagatttcgttattgtattttagtttgggcgatagagcgagatttcgttttaaaaaaaaaaaaaaaaaaaaaaagaaagtttatggagttttttttttttaaagtagttttttgtttaattttttttatttttaatattttgtatcggtgtggtatatttgttattattgatgaagtaatattgatatttgttgttaattgagatttatagtgaaattagggattatttttattatatagttttatgggttttgataaatatattatgttatatatttattatttagtggaattgatttaagagttttataggtagttttttttttttttaaataaatatagaaatggatatttttggttttaaagtttgaaatttatatttgttttatttgagtttttttttaaaaaaatatttttttaggttttttaaaaagtattaaagaattggaatttattagatcgttttatttagttaatgagattttaggttttttatttattatgattgtttttttatttttttttagtttttgtttttttatatataggtaaatttttttttgttagataaatttttaattttagttagttatagagatggatttgatattggttttttatttttttagttgtattatttgattaaagattaaagtttttttttttggtaatatttattgttattttagtgattggttttttgtgtggtgagtagtaagatttagattgaagtttttgtgtgtaagatttagattgaatttttggtgttttagtgataaaattattttatgaagtagtttcgtttatttaaaattgttttaggttttatttatttatgtattttttttttttttgaatttttggaaattattatttattgttattgtatttatgttttttttagaatgttatatagttgtaattatatggtgtatagtttttttagattggtttttttatataataatatgtatataggttttttttatgtttttttttagtttgatagtttatttttttttaatgttgaataataatttatggtatggatttattataatttatttatttatttattggaggatattttggttgttttgaatttttggtaattataaataaagttgttataaatattggtgtatatttttttgtgtggatagaagttttttatttatttgggtaaatatttaggattgtaattgttgaattttgtggtagagtatgtttggttttggaagaaatagttaaagtgttttttagataagttaggggaatagggtttggaggtagggaatttaaggtcgttttatgttgatattcgaatggaattaaattgaaaggaaaatttaaattttttatgtttaagtagtagaaggattaaagattattttttttgtaattcgttttttattttttgcgtggtaaatgtgaaatttaaagtatttttgattggttgttttttgtaattagttagatatttgtataggagtgtagttttgtaattttatttcggtttttgattggttgcggaattgttttttttaaaatttttatagtttagcgataaaaattttagaaaagtaaaataagtataaattaaggtggtataattttgtaagatttaatgaataaataacgagtttttttattaatggtttagagaaagtagatttttgagaatgttgtaaatagaataagtgtttgttaatatatttataattttaatataaaataaataggtgaataatagagaatataattgtggggaaaagaaagagagattagattgttattgtgtttgtgtagaaagaagtagatataagagattttatattgtttcgtattaagaaaaatttttttgttttgagatgttgttaatttgtaattttatttttaattttgtgttttttaagatatgtgttgtgttaatttagggttaaatggattaagggttgtgtagggtgtgttttgttaaataaatgtttgaaggtagtatgtttgttgagagttattattattttttaattttaagtatttagagatataaaatattgtagaaggtcgtagggatttttgtttaggaaagttagatattgtttaaggtttttttttatgtgatagtttgaaatatggtttcgtgggaagggaaagatttgatcgttttttagtttgatattcgtaaagggtttgtgttgaggaggattagtgaaagaggaaggaatttttttttgtagttgagataagaggaaggtatttgttttttgttcgtttttgggtaatggaatgttttagtgtaaagttcgattgtatatttcgtttgttgagatgggggaaaatcgttatagggttggaggtgggatatgttggtagtaatattgttttttaaggtattgagatgtttatgtatatgtatattaaaagtataatatttttttttttattttgtttatgatgtagagatatttgtttatgtgtttatttgttgattttttttttattattattttattgttttgttatattttttttttcgggaaacgttcgataatgattaataaatattaagggaatttagaggttcgtgtcggcgtgggtttttcgtatgttgaacgtcggttttttgggtttatttttttttttttatattttgtttttgtgttttttttttttttaagtttttcgttttatttgatgaggaacgtttataggtgtggaggggtaatttatttttttatatatttaaatttagataagtatggaatgaaaagtaaaagtaagtttatatttttttatgtaataagattatttttaaagtagttttaagtgtataaaaaatttttaagaaagtttagggagtttttatatatttttttttttaaaatagttttttgtttagttttttttattattaatattttgtattagtgtggtatattagtattaatgaattaatattgatatttattgttaattgaggtttatagttatattagagtttattttattatatagttttatgggttttgataaatatataatgttatgtgtttattattaaagtgaaattaatgtaatagttttatagataattatttggataaatatagaaattattgtatggtaagtgtgtgtttagttttgtaagaaatagcgagtgttttttaaagtggttatattgttttgtatttttaatagtaatgaattagagtttttattgttttatatttttgttaatatttggttttgtgagagttttggattttggttaggaaaaaaaaagttttttaaaaatttttatttgaaaattattatagatttataggaaattggtaaagatagtataaaggacgtatgtatatttttttacggagtttttttaaatgtttatgttaagtagttttagtatagtagtaaaattaggaaattgatttcgatatgatatgtgtttatagttttatgtttgtgttttattatatttgtagatttatgtatttattacgtaatttagtggagagttattttattttatagagatttttttttatgttgttttttagagttatatattaatttttatatattattattttgataattattagttttttttttattaatttttataatagcgttattttgaaaatgttatataaatagaattatatagtatgtgatttttgtgattggtattttttttatagtataatgtttttgagatttatttaagttgttgtatgtattaataattttttttttttattgttaaggaatattttattagatgaatgtattgtagtttaattatttgtttgttgagggatatttggttgtttttagttttggggttattataaataaagttgttgtgaatatttgtgtaagatttttgtgtgaatatgtgtttttatttttttgatataaatgttttagaatgttatttttgatttatatggtaaatatatgtgtagttttttaagatattgttaaataattttttagaagtgagaggtgaagttagttgggtttttgagttgggtagggatttggagaatttttgtgtttagttaaaggattgtaaatatattaattagtattttgtaaaaacgtattaattagtattttgtaaaatggattaattagttttttgtaaaatggattaattagtaggatgtgggtggggttaaataagggaataaaagttggttattcgagttagtattagtatttggtttgggtcgttttttacgttgtggaagttttgtttttttgttttttatgataaattttgttgttgttcgttgtttgggtttgtattatttttatgagttgtaatatgtattataagggtttatagttttatttttgaagttagcgagattatgaatttattagaaggaagaaattttagatatatttgaatattggaaggaagaaatttcggatatattatttttaagagttgtaatatttattgcgaaggtttgtggttttatttttgaaattagtaagattaagaatttacgagaaggaataaattttggatatatttggtaatttagatgggatatattttggcgattataaagggatatattttggtattttatatgggatagttatttatcgttaagttgtgagtatttttagattttttttatttgttattttgttttatttttttttagaatttgggggttaaatattaggtatttgttggttagttaaaagtgattagtgtggttattggattaaagatacgggtattaggttttttgggaaagggttttttaataatttttgattatttggagttgggagtattggtttgtatggaattagtttttgttttttttgtatttttgggttgagttaaaggttaatagagaggaaagttatttagtttaggggttttaataataagttggtcgacgttgtagttatgagtagaatttttaaagttatttgtttgagtgagattcgtttgtttattttatttattttgatttttgtttaagggttttaatgtttgtcggataaatttttttttgttttttttttttgaggtgagttttgtttttaaaaattattttttgtttttggaatttttagttttttttataagaattatttttagtataaattttaggattttatttttttttttaggtatttaggtttattaattagaaagatataatttttgtttaaaattttattgggtggggagattaattatttttttaggatttttttttagattaataggtttaataaaagttatttttgaagttaggatatggggagttttagaaatgatattttttgtattcgagtgaggataaaaggtattatttttttaattttggagatttttttttttttttagggtgtggttttttattttatttttggggtataatatttttataggatagaggtaaagttttagtgttaataggagaatgtttaggattttaataagttttcgattagtgtattagtaagggttattaaattttattttttttggttttttttgtgatttaggaggataggtaagggtgaagtttttcgagaatgcgtttgtaagggttattaaatttgattttttttagttttttttgtggtttaggaggaaaattagtgtttttgttgttgcgttggtgagtgtaattattttaattagtagggtttagggatcgttgtaggattttgggtaagaggtatttttgtttttgtattggtgagtgtaattatttcgattagtggttttagggattattgtaggtttttgggtaagagggagaagtaaataaattaaaattatggatggttttgttttttagatgagaaatatttaggtattaatatatttatttttgaaatgtattttaagttattgggattaatttgatttattaattttgaaaaagaggtggtttatttttttttgtattatagtttggttttaatatttattttttgatggggagaaatggttatttgagggaagtataaattataatattattttatagtttgattttttttgtaagagggaaggtaaatggagtgaaatattttatggtatggggttatgttttttttaagttgtaaggggaggggaatttggtttagtttaggtatatgttttttttttattttttgatttaaagtagattaaggtaaggtagatttgggaagtttttagatgattttgataggtatatagatgttttatagggtttagggtaaacgttcgattttatttggagagatgttatgttattgttaggttaaatttcggtttttaatgaaaagaatgaggttttagttatagtttaagagtttggagatatttggtattttagttaagtaaatgatagaatgatagttgaagaaagggataaattttttattagttggtaagttatttttagtatggatttttattgggattttgatttagattatggggattgaagttataaatatttgttgatttgtgttttagaaggattaaggagaattaggaaaaagtttatgaattatttaatgatgtttattataatttaggaaaagaaagagaattttttttttttttttgagtagttatgggagggtttaagaaaatatatttttttgttatttaatttaatttattagagggttaattgattttaaaatataagtttattatttagttagttatagatattaggagagagttttaaaaagcgagttttgggttttgaataaaatttagaggtattattaaatttggtaatttcggtgttttataatagggattaagaggaataggtttaaaaggaaaagtgagattagagaaaagttatagttttagttatggtttttagataaatagaatttggtggtttagagagaataaaaaatggagtaggttaattatttagtagggtttgttattagtgtggtttataaggatattttaaagaagattgtttaatgagaaataagcggtttttttgtttatgtttattatgttgaggtaattattagaaggtgtattgttttagaggataaaggttttttgggttagaagtttttaattagatgatttaataataggattgaggatgtttggggtaagtgttagtttatgttattatttttattgagtttcgggtatgtttaattattgaaggttatgaaattggtttttttttggatattggtatagtttttttagtgttaatttttggttttggatagttgtttattattcgaggaattttgggatggtttataataaggtattttttttatttttttggttgtaattgggagattttgttttttttatatgttttttttgttatgtttgaaagttttatattattttagggagggatatattagttaaagttggagttattatttatatgaatatggggaataagttacgtatttgtagttttttgtttgaggagggaattaattttgaagtttgggtattggaagaataatttagaagggtaaaaaatgttcgtttagtttaaattaggttaaaagtttttaatattaatgaatgtttttttatttttttttttaattatttttttaaatggtttttagtagatataaaattttttttttttaatgagaaaatagaatatagggagttatttagtttgtttttagtatttttttttagttatttatcggagttatattggtaagtattttaggagtatgggaaaatgaaaataataaatttatatatatttttatatatataattagttttgtttatttagttaaggtatattttttttatgtggaatgttaatttatatttgtttttttaatatttggataggtatttatattttagtttttttaagatttaatattaatattgttttaggaaattagattttattagtattttttaaagtttaagtttattagtatagagttatataattagtatttttatttatagggttaggaatggttattgttagaggaattagagtagttagtttatttattttattattttattattatatatttttaaaggattttttagatagtttgtaagaaataacgaaatttatttttattttataatatttttaaatagattttttggtagtagtgattttttaaaattatcgaggtttagatttttttattgttgagaaaggagaattttgcgtttttttaggggaagaatattgtttttatattaattagttagggatagtataagatgttatttagtgtttataggaaaagttttgtgaaattagataatgtttttgaaatttttatattaatttttggagttgggtaatatggttttttttttttttaggttttgtgatagttattttattattattcgtttttaggttttgtatttttaatttttttgttaaatttgttttttttaggatcgaggttattaagttatagatggttttataaagggattttaaatgagtttaattaataatttttattaagaatttttggattgagttattgatttttttattggtttaaagagtttttttttggaggatattataattgtagggttttttttttatttttatttagtaggaagtagttagagaggttatcgtttaatatttaatagtcgttggggtgttttgtttagagtggggattgagagttgaagatcgttgggtttttgggttaggtggggatttggagaatttttttgtttagttagaggattataaatatattaattagtattttgtgtttagttaaaggattgtaaatgtattaattagtattgtgtaaaaatatattaattagtatttcgtgtttagttaaaggattgtaaatatattaattagcgttttgtaaaaaggatttattagtatattgtaaaattgattaattaatattttgtaaaatggattaattagtaggatgtgggtagggttaaataaggaaataaacgttggttttttaaattagtagtggtagtcgtttagatttttttttaagttgtagaagttttgtttttttgttttttataataaattttgttgttgtttattttttgggttcggattatttttatgaattgtaatatttattgcgagagtttgtggttttatttttgaagttagcgagattataaatttatcgggaggaattaataatttcggacgtgttattttaagagttgtaacgtttattgcgaaggtttgcgattttatttttgaagttagcgagattataaatttatcggaaggaagaaattttggatatatttgaatatttgaaggaaaaaatttcggatatattatttttaagagttgtaatatttatcgcgaaggttcgtggttttattttggaagttagtaagattaagaatttatcggaaggaataaattttagatatagaaggatagttttattttatatttttattattagtgtatgagaaatttagtttttttgtatttttagtagtatttattattgttatattttttagagattttagttgtattaagagttgtgtggtattattagattaagtttttaatttgtatttttttgatggttagtgatttgtatgttatttattgtgtttatttgttatgtatatgtattttttttgataaaatgtttttttatattttttgtttattttgtaattaaattttttttatttttgagatggagttttgttttattgtttaggttggagtgtagtggtacgattttggtttattgtaaattttgttttttgggtttacgttatttttttgttttagttttttgagtagttgggattataggtatttattaaaatgttcggttaattttttttttgtattgttagtagagacgggattttatcgtgttagttaggatggtttcgattttttgatttcgtgattcgtttatttcggttttttaaagtgttgggattataggcgtgagttattgtgtttggttataattaaatgttatagtttgtattttgttatatattttatagaagagtttttatagttgattatatattttcgataatgtatttttggtaatatatgtgttttaaatatttttttcgtatttttaatttattttttattttttaataggatattttatagaataaaagttttaaattttgaagaagttttatttattgttttttttgtttgtttgtttttgtttttttgttttttatacgtagtgtttttgatgttatgtttgagaatttagaatttagatagtaggttttaggttttgatgattttttcgtgtttttttttaaacgttttatatgtagatatgattttattggggtaaatgtttttatacggtgtgagaatttgttattttttttttgtttttgttttgttttttgtttggttttgtttttgtttatgaatttttatttttttttggattattgtttgaaaagattgtagtttatattatttttattgaattattttgtatttttgttaaaatgagttcgtatatgtgtatttttggattttttatgttgttttattaatttatgtttatttttgtattaatgtcgattagtattgattattatagttataaaaattttgaaatttggtaatagttattttatttttttttttgtgaaatttttttttatttatgttagtttttttggttttttatatgtattttataataattttgtttataattattataaattttgttggaatttagggagaaattgtgttaaatttcgatattaaattgaggagaattgatatttttattatatttagttttttagtttatgaatatagtaaatttttttatttttttagatttttttatttattagtattttagtatatggattgtgtatatgttttgttggtatatttatgaggttttttgaatgaaaataatttatgttgtatttttagtatttgttttgatttttttattattgtatatttaaataaaattgattttttttgttgattttgaattttgtgattttgcgaatttttttagtagttgaagtagaagaggaaaagtatttagatttttattattaagtataatttagtcgtaacgtttttgtagaagttatttatttagttgaggaggttatttttagtttttattattttgaggggtttttttaaattataaattaatgttgaattatgttaaaggttttttttatgttaattgatataattatgcgatgttttttttttagttttttaataagaaggatgatattgattgattttaaatataaattagatttgcgtttttaaaataaacgttatttggtatattttatatatatttttagtttggtagattttttatttgttaatattttgttagggagttttgtatgtatagttatgtaggtatattgttttttaatttttttttgttgtattgtttttgtgtgttttttattttaggaaatgttggttttataaagtaagttgggatgttttttttttttttttgttttttggaggaaattttgtagagttgtgttaattttattgaaatgtttggtagattttttttgtaaaattattttaaattagagattttttttataagtttagttttttttataattatagagttttttaatttatttattttatattgagttaattgtaatagtgtgtatttttgtatttttaaaggatttttttttattttatttaagtgtttttggtgtatttttttggtgtattattgatgtcgaagaatttgtagtgatataatatgttttaattttaatattggtgtttttttttttttttttttttattttgttttagaaatttgttagttttattaatattttttaagaataaattttttttttattaattttgtttttgttttttttttttttttttttttgagacggagttttgtttttgttgtttaggatggagtgtaatggcgttatttgggtttattgtaattttcgttttttaggtttaagtgattttttttttttagttttacgagtagttgggattataggattgcgttattatgtttagttaattttgtatttttagtagagatagggtttttttatgttggttaggtttaaattttcgattttaggtgattcgttcgttttagttttgtaaagtgttgggattataggcgtgagttatcgagttttgtttttatattagtttttttttttttttttttttttttgttttaggttatttttgataattttttagatttttgaggtgggaattgagattattggtttttgaggtttttttttttttagtgtatatattttgtattatgtatagtagtttaaattatttttttagttatgtgttaaatattttgatatgttgtatttttattattatttagttgaatatattttttatttttttaagatatttttttttttttgagatggagtttcgtattgttttttaggttggagtgtagtggcgtgattttagtttattgtaagtttcgtttttcgagtagttgggattataggcgttcgttattacgttcggttaattttttgtaattttagtagagatggggttttatcgtgttagttaggatggtttcgattttttgatttcgtgatttatttgttttagttttttaaagtgttgggattataggcgtgagtcgttatgcggcgtttttagttggagtgtagtggcgttttgtcggtttattgtaagttttgtttttcgggtttaagtgatttttttgttttagtttttcgaatagttggtattataggcgttcgttattatatttggttaattttttgtatttttagtagagacggggttttagtatgttggttaggatggtttcgattttttgatttcgtgatttatttatttttgttttttaaagttttgggattataggtatgagttatttcgttaggttttttttttttttagatggagtttcgttttgtggtttatgttggagtgtagtggcgtaattttttttgattgtaattttagttttttcgtgttttagttattttcgtgttttagttttttgagtagttgggattataggtaagtgttattacgtttagttaattttttttgtatttttggtagagttgggggttttattatgttggtttggttgttttcgaataattgatttcgtgatttattcgttttagttttttaaagtgttgggattataggcgtgagttattatatttggttaagatattttttgatttaagggtaatttaaatgtatgttattaagtttttatgtgtttggagttatattgattttttttatgttattgatttttggtttagtttcgttgtttttagggagtatagtttgtatgattttaattttttatatttgttgaggttttttttatggtttagggtatgagagatgttggtaaatattttatggatagttaaaaaatgtgtatttttttgtttggtgtggtggtttgttaatgtttattagattttattggtggatagttttgttgggttttattattttgttgagtttttatttagttgttttattaattttttagagttggtttgtggagttttaaagtttaattgtgtatttgtttatttttttttttagttttgattattttttgttttatttataagtaatttagttgtatggtgtatatatttttagagttgttatgttttttttttgaattaatatttttatgattatgtagtgtttttgtttgttttttagaatattttttgttttgtgtattttatgttatttgatattatagttatttttgttttttttgataaaagtaagtacgattttttttttttatttttttattttaggtttttatttttgtaatatttgtggtaagttttttataggtagtatattagcgggttattatgttttattttgatatttgtttttttagataatttatatgttatgtaattattaatatgtgaggttttatgattgttatttggtttttgttttttttggtttttgtttttttgttttttttttttgtttttcgatgtgttttttaagtaatatttagaattttattttttaattaattattttttggtgtattatattgtagagtttttgtgttttatttatttattaacgtaatttatagtttatttgtgttgagatttttttaatttgattatagtgtaaaaattttatttttttattttttttatttttgtatttataatatatattttttattttttttatttgtattaaaatttagatttgataatgtcgtaatttttgttttaattattaaattaatttataaaattgaagaagagaagtttgttgtattgatttatatttttatttattttagttttttttttttttgattgtttaagatttttttttttattatttttattttagtttaagtattttttttatttttgttttaggataagtttgttagtattaaatttttttgatttttttttttttaagaatgttatggtcgggcgtagtggtttatatttgtaattttagtattttggaaggtcgaggtaggtgtattttttaagtttaggagtttgagattagtttgggtattatggtaaaattttgtttttgttaaaaatataaaaagttagttaggtttggtggtgtgtgtttgtaattttagttatttaggaggtagaggtgtgaggattatataagtttgagaggtagaggttgtagtgagttatggatgtgttatttttttttagtttgggtgatagagtaagattttatttaaaaaataaaaaaaaaaagaaaagaaaaaaagaatgttatgatagaatttttattttataataatatttttttggatgtatattttaggttaatattatttttagttattaaaatattttgtggtatttttttttggtttgtatgatttttaatgaggaatatattgttatttaatttatttttttttgtatatgagatgttattttttttttgttgtttttaagattttttgatataaatttttttggatttatttttttttagatttgtatagatttttgaatttttattttaaagtttttatttaaatttggaaaatagttaatttttttttaaagattttttgggtattatttatttgttatttttttttaagattttagagatataaattttatatttttttttatagttttatagatttattagtatgaaataatattgaatattatgaataattttataaaaataaatttgtatgtaatgaataaattatttaaaatgtgtaatgtattgaagttaataaataatataaaatatgaagagttttatattttatagagaaagttaattttataaagtttttttaagataaaattttaggtttatttagttttagtaaatattttaaaatatttaaggaataaataatattaattttatgtaaattttaaatatttgaaaaagtggaaaatatttgtagttaggtttgatgagatttgtgtaaaatttattttaagatttgaaaagaattttataataaataggaatttatggattaataatttttatgagttaagtttttaagaaaataatagttaattgaatttattgatataaaagatggttattatattatgattaagtggagtttattttagaaatgtaaggttgtttgagtatttgagaatttattagtgtgatttattatattaattgaaggagggagaatatatatgtaattatttggatagagttttgaaatatgatttgatagaatttagtatttggttttaattttttaaaaatttatttgtaaatttgtattaaaaagttatttttttagtttgagaaatgatagtaattttattgtatatattagttttagtcgtgaaatatttaaaattgttttttttatatttggagtattagaggagttaggtaatgaaaacggtaagaaaaataaataaaagagatgataattgtatttaggtgaaatggttattatttatttttaatataattagttatttggaaaataaaattagtaaataaatttatagttttaataagtgaatttaaataatgttgttgaatacgaagttagtatatattaaagtaattatgttattgatatagtttggatgtttgtttcgtttaaatttcgtgttgaaatatagtttttagtgttggaggcgaggtttggtgagaggtattttggtggggggtagattttttattgatggtttggtgttattttagttgtaatgtatgagtttttatttagtttataggagatttggttgtttaaaagagtgcgatttttttttattttttttgtgtttttgtttttattatgtgatatttaggttttttttttttttttttatgattgttagttttttgagggtttttattagaagtaattgttagtattatattttttgtatagtacgtaaaattttgagttagttaaattttttttttttatgaattatttagttttaggtatttttttttagtaatgtaagaatggattaatataataatgttttattataaataaatagaaaataaaattaagaaaataattttattaatttttttatttttttgtttttttgttgtggttgttttttgtttttgagatagagttttgttttgttttttaggttggggtgtaatggtgtgatttcggttttttatagttatcgttttttgtttataagcgatttttttgttttagttttttgagtagttgggattataggtatgtattattacgttcggttaatttttgtatttttagtagaggtagggttttattattttggttaggttggttttgaatttttgattacgtgatttgtttattttagttttttaaagtgttgggattataggtttgagttattatgtatagttttgtttttgtttgtttgtttgtttgttttttagacggagttttattttgtcgtttaggttggagtgtagtggcgcgattttggtttattgtaatttttatttttcggttttacgttattttttgttttagttttttaagtagttgggattataggtatttgttattatgttttgttaatgtttttgtatttttagtagagacgaggttttattattttggttaggttggtttttaagttttgatttcgtgatttattcgttttggttttttaaagttttgggattataggtgtgaattattatatttagtaataatgttttatttttttaaaaaagaattattttaataggtttattgaagtataatttatatattgtaaaatttatttattgtttatataaaatttaatgattttagtaaattaatggatttgtgtaattattataatgatttagttttataatatttttatcgtgtttaaaatttatttgtttatagttaattttcgtcgatattttaagttttaggtatttaatgatttgttgtttgtgtttataatttattttttttagatattttaagtaaatgaaattatataatatgtaattttttgtgtttagttttttttatttagttaatattattgaagtttattagttttgtagtatgtattattaattttgtttcgtttttttttatttttttttatttatgttgtttttttttatttgtgtgaatttataaggtataagtgtagttttgttatttgtatagattgtttagtggtgaagttagtgtttttgtagtatttattattttaattacgtgtattgtttttattaagtaatgttttattatttggagtgtaaggattgaaatttgttttgggaaaattatttttatgtttatggtattttttttgttatataagtttatttttgtttttttttattgttgaatgatattgttttgtatggatgtagtattattttgtttatttatttattagttgaaggatatttggattgtttttagtatgggtttattatggttaacgttgttttgaatatttaaatatatatttttgtgaggatatatgtttttatgttttttaggtagattttaaggagtgaaattgttgggttatatggtaaatgtatgttaaatttgttaggaaattgttaatttttaggtatttgtaaaattatatatttttattagtattatataagggtttaaaaggtttgtttgtttttaaatataattataatgttgatgatattattagaaataatatttgttagtcgaatacggtggtttacgtttatagttttagtattttgggaggttaaggtaggtagattatgaggttaggagttcgagattagtttgtttaatatagtgaaattttgtttttgttaaaaacgtaaaaattagttaggtacggtggtatgtatttgtagtcgtagttatttagtagggtgaggtaggagaatcgtttgaattaaggagtcgaaggttgtgcggagtagggaatatattattgtattttagtttggataatagagcgagattttattttaaaaaagaaaaataaataaataaataatatttgttttgttaattttatattttttttttatgttttaatttttatttatttaggatttatttagtgaaaaaaatgagtttggagtatattttattaaaaattgaaattaaattttaattttttttaattttagattttgttttattagtatttaatgaaaaaaaaattagtaataaatgtttttttaaaaataaatgtatagtgtgttttaaaatagtattttatagagttagttatttttttttttgttttttttttaaaaatttttttagaaaatatatttattttataaaataatatgttagtatatttgagttttaaaaataattttttttatttgtttttttgttttattgtaattgagttaatggttgatatttaatatttaatgtgagtatattatatatgtttatatgtttttaaaatatatatatatttaaatatatgtataataaatatatatgtatttaaaaagatttagaaattttgaattgaggatgtttatcgggaatttttaggtttttacgtggaatttaattatgaatattaataatttaataatattataattttttattgttttatttagaaattaattttttttattttatttattatttttttatttttaaaaatatatgattttgttttttttttttttatgtgtattaggtttattttataaaggttgaattttggtttatttgagtttatgtgattttacggttattttattgtttgagaaagtgggtattgggaatattttagaaattgtttagtagatttttataaagatatataggaaaaagttatattttttttttgtttttgggagttgtgaaagaataagaaaattaaagttgttgtaggggtttttttattattttaggaaagttgacgtgttgtgtgtgatagagagatgagttatgaagttttagaatcgttgatgatgatattggtttgttgagttgagtaattttgatgatgtttagatttggatgtatcggtaatatgagataatgggttaaagaaaagaaaagtttattagatgggattttttgttatttgtagtagaaggtatttttatttagatatttattttatatattttagtattattttagaattttatattataagttttatataaaatgagataaattatttttttaatttaaggaataaagtatatttgtggtaattttgggattaaatagaataaatataattattagtttagtatatttttataggatttatatttttataggatatatatatatatgtattgttatgtatgtataataatatgtaattaaaaataaaatatgtataaaataaattttgaatttgattgaaaataaaataatagttgtttttgacggataaattatgtttagatgattattattttgaagtaaatttttgaattgattatgtatttttagatttgatatatttgatgttgatttttagatagaatataatggagaattttttattttttaaatttgtttttttttgaaatttgtataggttttttgataatattatataattgaagtttttggaatgaaaaattatatattaatttaaaggtatagatttataatatcgtagacggggttaagaaaaagttttgattgatttgttggttggttttttattttatgtttgataagtttgttttagttgttatagtttgtttttagtttttatgtattgtttttttgaatattaggtttatttttttaattggaaagtaaaaattgtatattatatttatgttgtagagtatgaagttttgatatatgtttatagtgtggaatgtttaaattaagttatttaatatgtgtatttattttatatatttattatatatatatgaaaattattattttattgggaaataatttttttttttttttgttttttgtttttgtagttaaatggattagataatttttaattttgtttgagaaatatttaataatgtaatgtgtttgtggtataaggggagtatagatgtaggggaggtaggaaagtttaggtaaagagaagtataaaagttgaagatgaggcgttgttattaaagttgtggggttttaggttaagaataggagttgcggaagttataagggaggatattttttgtagagttgttgaattagtaataatttagttttgataaagtttttgtggaagaataatagttaagtgggaaagttttttattttgtaaagttggggtagaaggtttttttttgaatgtggttatttgtattttagttcgagttttgcggagatagaggaaattgtttttagatttggttttattaaaatttttttttttcgtttttaacgatttagatgagagtattgtaggaagaagaaaaataagtttttaagtttttttgagttaatgattttgtaaagtataggttttttttaagtggagaggaggagttttggtgtaaattgtttgattagaaatttggatttaaagttttttttattatttttgttttacgttttattatttttgttattattttagggaaatcgaatttttttttgaaagaagattaaaaggtattattttttgggtgaagtttagagtgttttgggaaaaagaggaaaatatatatatttaaaaggtatggaagtaaatttgttttttaatgtaatgttttagttttagattttttatttgagatttttttaatattataatttttattaattacggtagagaagagtagaaatagattatgtgatttatgaagtatgaggtgtttgttataggatttagtgtaattgtattagttttagtggtttttttttaatttgttttaggatttcgaagtaaaggatttttatttgttaattttttttttatttttgtaggttataagttattatgttttgatatagtaattatgtattgatgatttttggattattaggatattggaggttatttggggaaagaaaggttttatttagggttattgatatattgagaattaattttagtaaagttatatttttttttttagaaaagtttatggagatatttagtttttaaaagttttttatttttttgatttttgaagtagatgaatagtttcgttttaaggaagagtaggtttagtacgaagttttcgattttatttagtattttgttttgtgtagatttagatcgtgtttttgagagaggaagttaggtttagtgacgtttattttaaattgaatttttttatttgagattttaagatttagagtttttaaaatggggaagaaggttattttgtaagaattaaaataattagttgtttttgggggaaaaaacgttttttaaattatattgaatagttataaggtttaggtattaattttatttaaatattatagttttgatgtaaggtataattttaaaatttgattaatagaaagtttgagttttagtgaggttaagtagtttgtttagagtgatagagttaataaaagatagagttgagattggattttttttatgttaggaaggtcgttgtagtttttttttttttagattataataaataatttagattaaaagtattagaaatatagttttagatttagaggtttagagtttagggagatcgcgtgattttgatttgtgttattatgtggaggtttaaaagagggatagttttttttgcgtggtaggtatgattgtttttttaggaggtataggtttttagaaatttgtttttagaaatcgtttttagaaatttgtttttagaaatcgtttttagaaatttgtttttagaaatcgtttttagaaatttgtttttagaaatcgtttttagaaatttgtttttagaaatcgtttttagaaacgattatagggttatttttagtgatttgtgttgatggagatgagaatatggagtaaatgtaaataggatgtgggagaggagaaatttgatatttagggattggtatagttttttttttggtgggtgagaaatttaggaagttagaaaattgtttattttattgtattgtgagagggttcgttatgtttggatgtttttttatttcgaggaattgtttttagtattattagggtttggaaagtttagtttttattttggattaggtttatggagattatcgtagttttttttttttgattatttcggaattatttgattttaatgttgtttggatagaaattatttatatagtagattaggaggttgttgtgaggtaggggttgggtttttgtaggatatatagtttttttaggttggattaggagaaaaataggtagagagaatgaattaggaagttagagtttcgttgtttagttgtttgtttgtttttttgtaaatttaggttttggttttgattaggtttttaatatagttggttatatgtttttatagtgttattagtttggaatttaatcgtgatagtgtggatttattagatttgcgagatgttgtaaaaattttatttgtttttttatagtttgaaattgttatgtattatttaagtgtttataaatttttgaaagtatagagtgtattaattaaaattgatatttgagttaggttgtttggtttaaatttaaggtttgttttttagtggttgattttggaagagttttttgatttttttgtgttttaatttttttacgtataatgtaggttaaattatattaatttattttttggggttatatgaggattaatttacgtaaaatatataaaataatgattgaagatagtttttaatttatgaggttagaaagttttttattttattttattgtgagagggtttattatatttgggtgttttatttggtatttatttattatttttttatattttgagagaagaatatgttttaaagtaatgtggatagataaaggtatagagttgggtatatgaggaaatcgagtatgaatttttaggaatagtatttttatgtatttatattttagaatattagagaaatggttttgtttttgggaaggcgggatagatagaaatgatttttcgaatttttatattcgtagaaaagtttgagttttaaagtagagatttaggaattaaggaacgttattttagttttgaaagtttttatatttatatttagttgattaatgtattttttgtgtaaaataagtagaaatgattttttaaatatatatatatatatatatatatatatatattttttttttttttttttttttttgagatggagttttattttgttgattaggttgaaatgtagtggtgttattttggtttattgtaattttcgttttttggatttaagtgatttttttgttttagttttttgagtaggtgggattataggcggtaaatttattagatttttttaatgttttttttttggggatttttataatattttcggaaaattttttttttttttttttaagagtggttaatgtttttttattggagttttaatattcgtattaggagttaaaaaatttaaagtaaataaggttaaatataattttgattgtagtggtaatttgttttttattttttcgttttgtttttttaatatgtgttgtaatgtttgatgtgtttgttttataatgttttgttttttaggattataaggaatttttgttttatgggttatgatttaaagttataggaaattttgaaaagtatgattagtataagtaggtttattgttagtttttaattgtttaggtatttttatatgagtaaatgatgatagaaatgttgtcgtatatgattagttgttttagttgtttggtatgtagtatgtagtatatgagaataagtgtttataggtatatgaatatagttaagtttattaaaggttgttatgtgtgtaaatttatttgttaaattttatttagagttaaatttcgtggattatatttttttataggtgtggttttagggatatgttggtaagttggatacgattgtattatagatttagtttggttgtgaggtaagttaaacgtataagtaagggtagaagtgttttgatgtagtaatatatgagaggtttgagtttgttgaaatatagaattaattaatttatttgttttattattatttagagatagggttttaggaagttgtgtgtgagagtaaataagagaaaaatgaaaaggagttgtataagatcgaatagtttgttgaagttttaggaaaaaattaagtagttttggttttagggtatttttaattgtagtagtttttatgtaattggttatatttataatataagttgaattatagataatgttgatagtatttgaagttgtgagttgtaaaatttgtatgattgtaattaattttgagtattgagttgaaattttagaggttattattgtttgagtatgtttgggtttataaatagttgtattatttttggaagagttattagtaaaataggtttgtttatttggaataggtttgtgatgagtaattataggaagaatgaaagaatagattttataaaattgtataattttgtttgaaggatggtgaaagtaaaggtttttgtggttgtagttgggaggtatgtcgttgttgaagtatttgttttataggttgtaatttagtttttgtttttttggttaattgttgcggggaatttaatgaagaatttttttgtagggtttgagaaggttgtgttagttgataagtggtaatatttagtattgggtgtagttaattaatattttttaataattgttgaaaattatttaaagtttgtaatttgtttttaaggagaattattttttgaggtcgtatacgttttttagtaataatattatttaagtaacgatatggcgaagttgtttgtattttttttggagttatttttagattttatttagttaaagtttgttttgttttttagaataattgatgtaagatttgatttgtaggagtagttaaaagaatgttatttataaaatgaatgatgtaagtagtaggaaatatatttcgaggtttttttaatgtttgttttataaaatgttgatataacgtaggattgttaagtatgttttggggtaaaattttttattgatagtaagaaagaggttttttttgattaatagaaggtatagagaaggtaaattgaggtttattttttttatgtaatggtatagtgaagaaataatttttaagatttattattgtaagaggttaatttttaggaatgattattggagttggtatattttgttgtaatggatttattggtttaatttgtgtattaatagtttttaaattatgtagtagtcgttattttttagatttttttggaataataaatattggtgaattttgggggttaattgatttttttatatgttttgtgtttatttgtttttatattagttgttgaagttgtgttagttttttttgagataggggttattgatttatttatacgggtttgttattggttattttaatggtgaggtagagggtggaggagaaatattaatgatcgttattagaaattttgatgttatagtttttttttatttgtttttttagttattgatattgggttaggtttttttcgtaggaatttttttaaattttttttattttgatattttatgttttttaatgttttaaattttgggttattaaagtttttatttgtaagttttatatttaatgttgtaagtaagtttcgattttataaattgattggtatatttgtaatataaggttaaaaagtatatgattgtttattcggattaagataagataaaattttagtattttgttgaatatttttagttatttttatttttattagggatgtggaggttagtttgagagattatattggaggttagtttttattggatattattgttatattagtttttgtatttataagtttataaaattttttttttttaatttgtattatataggtggatttattagaggttatgggttgggatagatagattttttatgtagttgtgtttttaaattttttatttttttatttttttttttgtggagaaggatgtaatttgcggggaataagtaataattgagtaatatatttttttagtttaaaaatttaaagatattttgatattaaaattatttgaattttttttttataattagagttaattattttagggattatagttatgttttgtaagttaagggggtttttatttaaaattagttttatgtattttgttggtaaaggtttttaaatgttagtgggaattttggtaggtttgttttttttaattaatgtagttttttttttggtggggagatttaattttgtattttttggtgtttttgaggtgaggaatattaggaattaattttttttttgggatttatttttgaagtgggtttgtggtttgaattggaaatgttttcgttgtttgaggggtacgcgtataggtttttttttagtttttcgataggtgggtgttgtttttatgaaattttgaatggttgattattttagtgatttttttggttatagcgaggataaagttttggtgttttttttgttaggtggggtattgtattgtaagtttttttttgttttgagatttggcggtatttttttttaaaatgtttagtttttttataattataatatttttttattttagggtttgatttttggttttttttatatttgttaattgttaaattagttattgtttgcgttaatattgtagagtaatgaagtttagtttttataatttgataggttttgagaaaattttttaagttttttatatattttataggtgttaatgtacgtttataatttgcgtttatatttttaaaagttagagttaaggttagtatttttgtagtatcggtatgaggaatttgatgttttattgtattttgttattatgtaagaaattgtgtataaggtttttgtaatatttgtatgatatgtaaaaaggattgtattgggatttttttttttggaattgtggttttgtcgtatttagtagtttatgtatattgttggtatttgggagtgttatttgatgttttaggtttgaatagggttattatttaatagtatgttttttgtaatgtttttgtgtttagttatacgattttgtttagtattgtttgtatatattttttgttaatttaaatttaatgttaggtatgtataaggagataaataagtatgagttgaatgttttttattaaagggtagaaggcgtatagtattaaatataggttttagtagttttaaagtgaatgggttttgtatattattgtttattatatttattttaatttttttaataatttaaattttagtggagtgtgtttatgagtgagttgttatggattatttggattaggttttatagaaataggaaaagtgtaaggttttatgggttttttagttatggtagtagagtgtaaaatgttttgtattggggtttttatttttgttatcgaaggaggcggtatagatgtttttgttattggaggaggtagtataggttaatttttttttttttttttttgttttttattttaaattggagttgtgagtggtataatagatttttttagatttttagatttagaatattatttttattgtttagtagaataagaaggagataatggtagaaggatagtacggattaaattttaagtggagaaaagagaaggattaattttgagatttttttgatgagtttattttaatttttttgttttgttttaattttttatattaagagtgtttgtttgtgggaattatgggttatgcgtaataattttttgtagtatttttgttaatgtttgagatttaatttgagtattagattgttttaataaaattttaagtaattgtatataatgtttttttttaatatataaattttgttttatgttattttgatttagaaaattttttgtttttaatatttttttagaatattgattttatattgtttttagtatttttttagggtattgattttatatttgttgttagtagatttatttcggggtttttatacgttttgttaattttagtttttttgttttagtagattttttttgtttatattttcgtgtttttgtgttgtgaaattattatggcgttgttttgtcgttgtttgaatgttattatgttatggattttgttggattgaataaaggaggacgaacggggggaataaagataagagagtttatttggaagaaggggtcgggggtattttgtttttagtgaataagggttttgaattttgagttttttttgttgaaagaagtttaataaagtgaaaagagatagtgagaagggggtggttgttggtttgttgtttgttttagagtagttttgtaagattgtatttttcgaataataggttttagatgttttagtagataaatttaaggagtttagtgttagggagtgattgtttttagtaaaatttttggcggttagtaaagaagagagtttgtttttattttgtatttttgataaatagtttgttgtttgattatatagtattagtggaatgttgagttggttacgatttttcggttttcggttttttatattaaatggatttaataagaaagtggttgaatttatgtaattttgtagttttttttaatgaaataagtaaaaattaattataaagaaatgattgggtggtgagtgtataaaagatatgagttaggtcgggtgcggtggtttatatttgtaattttagtattttgggaggttgaggtgggcggattacgaggttagaagatcgagattattttggttaatatggtgtaattttgtttttattaaaaatataaaaaattaggtaggcgtggtggcgggtatttgtagttttagttattcgggaggttgaggtaggagaatggtatgaattcgggaggtggagtttgtagtgagttaagatttcgttattgtattttagtttgggtgatagagtgagatttcgttatagaaaaaaaaaaatagatgtgagtttagattttttagaaagagtatagtgtgaattagtgtttttagtttgtattattgatattttggattagataataatttgttggtgatggaggttgttgtgtatattgtaggttttttaaaagtatttttggtatttgtttattaaatattagaagaaatttttgttgtgataattaaaaatttttttaaatattgttatatattttttaagggtgatgggagggaagggagggttggcgaattatttttgggtaaaaattatgggtgtgaattatttgaaaaaaatttgtgttgaataagttattattagttatggagtagttgagaattattttgaaaaatatttgttgaaaattttggttttatataaaatgaaaatattgtagaattttggttttaatatatgttatgtttttagaaaatgaatttgtggagaattaagatttattgatttttttgttttattaattagttattaaattatattatttattttttatagtatttttttttttaatttttgtgttattggtatattaattatttgtggtaatgtattataattatagttattttatttttattaaatgttttaataaatttattttttttagttttttatttttaatagtattagtaggtattaaatttttagttttggttagaggtagaattttcggttttgtagttaagtttttttagaaagggagaaattaaaaaaatgatatttttatacggatagtttataaaaaatgagtaggtttttagattttgagtatgatttttataaagttttttttgttttttagaaaagatgttttggattaaaaatgtttgtttttttatttttaaattatttaagtattttttttatagagagaaagttaaaaaataaaaatgtgtgaagttattgttattgtgatttgtatggttcgttttgtaatttatgtttatgtgttttagttagggttgaaaggtttgataaataaaattagaggatgtttatttaaatttggatttttaataaattatggtgtgtatttgaaatttagatttaattagggatttgtattttatttggtaattttaggttaatttgttagttaaattttagaataaggagtgatttaatatttttttgtgttttttaatatatgtttaggagagatatatagaatttttaaaatgataaatgtaaaatgaatgaaagttttgtttatatattggaattagtagtttttgtatttttgtttttattttaagaaataatttggtatatttgaatattagaaatttcgttaataatttagatatagtttggttattatttattaatgatggttagatttttaatttttagaattagaaaatttgaatggaaatatgatttattttatttgggttaatttttattaattataagtttttttgtaatttattaaatgtatttaataatagcgtaatttttataggatttttgtttgtttgtttgtttttgagacggagtttcgttttgtcgtttaggttggagtgtagtggcgtgatttcggtttattgtaaatttcgttttttgggtttattttatttttttgttttagttttttaagtagttgggattataggtatttacgattaagttcggttaatttttttgtatttttagaagagacggggttttattatgttagttaggatggttttaattttttgatttcgtgatttatttttttcggttttttaaagtgttgggattataggtttgagttatcgcgttcggttaggattatttttaagtataaaattaaataatgatttttcgtagtattgattatataataaatagttaaatatatttttattttaatttttatgatttttttaattgtagtttatattattttttttattttttgattttaaagtaatttgtatttttattatgattttgtaattgttttttgtttttttattagttttataaaaaattgttattttgaaaatatagggtagaaatattagtttatgtttaataatgtagtatatttaaattttatataaaagggatttgttgatataggagaaagggattttttatatgtttagatttaaattgtaatttgatttttagtattatatttgggatattgggttttatttatatttttttaattttagatttttgagatgtatatgtttttaaatattatagatataataggattattgttgaaattgaatattgaaatttatagatttggtatatagttattgtagaatgttatatggtatgtattgatggagattagatttattttatttattattttatttttatgatttagagtaataattggtatattttaagttattaataaatacgggttgtgtgaaatattggttgtgtgatgttttgtatgagtagttattattgtatatagggattttttcgtatttttttgttattaatgattgagtatttttggtttataggtttttttgttttttttcggtttttttagtttttttttttagatttagttgtttttttaaatttagagtgtagtttttttttgaagttttttatttaaaatagttaattttaattttatttttatttttatttgttttttaaatggtttattttattttttattttggatgttttattgattgtagatattaattttagtaaatttagtatttgttttttttttatatttttattttatttatttaatgatatttattggttttttttcgttttttgaaaaaaatttgttttttttgatttataagtattatgtttttttggttttttttttatatttttggggtttttttttagttttttttgttggtttgtgttttttttttttttttatatataagttattattttatgtatttttttttattttttggaatttaatagagtatacgtattgatgttattaatataaatatttttagttttggatttatcgtgagttttttaaattttattgattttttgattgttttatataaacgttaataaattatttttaattatttattttaaataatttttttttatagttttttttattttaataaataatattattatttatttatttgttaagataaaatttttaggaataagtttgattgttttattttttttatagtaatttattaataatttgagtaaaatatatgtcgagtttgtttattttatgttttttattgtttttattattaatgtatattaggaagttatgagttgttttttttgaggattttttgttgtgtttttaaaaagtttttttttttatttgtgaattttagtaatttaatttttataaagtagttagaattagttttaaaaattgaatataaattgattttttttgtaattatttaatagttttttatatttgtttaaataaaattaaaattttttattgtgaatattagggtttaatatgatgaggtttttgattttttttttgtattttattttattatttgtttttttatttttttgttttttttacgttagtttttttagttttttttttttttttgtatataaatttttatattagggtttttttttaatttgtgtttttttggaatatttgatttttatatttttatatggttgtttatttattttgttgttttagttgaatgttatttttttaggtagagttgtttaagtatatgaattaaaattgggtgaatttaattttttttttttataaatttgatgttttttttttagtgtatgatgattttttgaaatttttttttttgttaaatgattattgggttattgtttattttttttatgattgtgtaatttttatgagtagggattaatttattttattttatttaaatagaatgatttgaatttagaagggaggttagtatatagtagttgttgataaaaataattgtggtttatatgaataaattagtattttcggaatttattattgtgtggattttgaaaagtaagaaggggtttaagttttagtatttttttattttgatgttatattagatttttttttttttttgtgagaaatataggtaaatttttttttttttttttttttagttggaagaatttatagataaggaaatagtaatttttttttttttttttatatttgggatagagtttagttttgttgttaggttggagtgtagtggtgtgatttgggtttattgtaatttttgttttttaggtttaagcgatttttttgttttagtttttcgagtagttgggattataggtaagtgttattacgtttagttaattttttttatttttagtaaagacgggttttattatgttggttaggatgatttcgattttttggtttcgtgtttcgtttattttcgttttttaaagtgttgggattataggtatgagttattgtaatcggttaaggaaatagtaattttaagaaaaaagaattttttgttgttgttgttaagatttatgtatttttagtagggtacggtggtttatatttgtaattttggtatgttgggaggtaggaggattatttgagtttaggagtttaagattagttttggtaatatggtaaaatatagtttttgttaaaattataataattagttgggtgtggttgtttgtttgtagttttagttattttggaggttgaggagggaggattatttgagttttggtggtagaggttgtagtgagtttttattatattattgtattatagtttgggtgatagagttaggttttgttttaaaaaaagaagaaattattttttgtgataaattttatagttttttgggtttgtgtaagttttaaggattttaggaaataatgataatatagttggggaaaaatagagagaaattggaggaagaggtaagtagaaatggttaaataagaaaagtcgagagtatgatgggtgaatttatgaaatttaggataagattcgagtaagagaatgagtttttaggatttgtttattgatttttagttttgtgagatgtgaataatgtttatattgtttcggtaattttatttagagtatatcgtttgaattttagtaaatttttgatatttgattatttttgatttaataaaaatagaattttatataattttttttatattgattgaatttttttttgtggagtttagttagagtatgtaggcgaaggtaatatataaaggttaaaagagatttataataaatattaatttgggtcgggtttttagaggatgttttaagttttttaggtattaaagaatattttataggtattatttgtttgtagggtgacgttaagtattaaagattttagttttagttttagggatttttttttataagaaagaaagagtagtaagtataatttttgttagagaatttatatacgttatagggatataggttttataaagattgtgttttagaaagaaaagaaaggagataatggggaggttattgaatatatttttatatatgaggaagaggggttaatattagaggttttgtggaggatataatattggattatttaggagagattttttgaatttttttgatttttataaaatttttagtaaaaatttttttttgtttgatataagttaatataataaagggaagtgttgtatggggaatttattttagtatttttatttttaaattttttaaagattttgaggatatgtgatgtaaaggttttattggtggagatttgagaagaaatggtttgtatataggttttttatatggagagggtaagtagtgaagttttttttgtggaggaaataatttgggatttatatgataaagatgggtaatttttgttgaaaacgttatatatttttaagggatatggtttgggtatagtgataaatttagttttttattttatttattttatagtagtttagtatttatagtgtgtatttaggtcgggtgtttatagttaaagttagtggggagtttagtattattagtgttattgttagaggtgttatgtaagagtttttagttaggtagtttgaggtatattatgttggagaatagtataggattaggtgttagggtagtaggtaagttttatatttatggagaattatgatttttattatttatattttaaatatagggaggaagttattaatttttttgtttttggattgggtaatttcgcgttggagaattaattagtatttgagtttagtattattattagttgttgtttagagatgtagtatgaaggtttttttttgaaataatttttttttttaaaagattgttttaatttagtatttggaaggttcgatttagttgtatgggaaatattttaattgggtttttattgtgagttatttttgagttggttagtgatgtgtttataattttgagttttgtaagaatatttattttttatttgataatagaagtatttgtagtagtgattgtgtttaggagtaaatgagatggagggaatatggttgaaaattaggatatttttaatttggtttttattgtattatattttaatgtcgtagatttgggaaaattattttatgttttatagttgatatgaaggtattatgattttttaggttttttaatattggaaaatgttgtgattttgtggacgttttaagtagtaatagtttttgggtatttgatgatatgatagaatgatagttgttgattggagagtgtaatttgtatttatttttaggtagggatgtttttaataagttaaaggaaatggaaagtttgttaataatttaatttgagtaaaaggttttatataaagtgtgttttttgatgttgtttttaagtttagtggtatttttagagtatatataggaaggggtttgtagggattatttatgtgtaatggagggtttgaaggtgtttttgtatagtatttgttttaataatgtgataaggttaattgtttaatcgaagtatttaggggtttgggagatcggttaaggatttaaagttagttgttgatagaataattttgttttaaaataattaatattttacgtgaaaagtgtttaattttttattttcggtttttattaggatttttttatttgattgaggttatggttttttattattatgttttttttgatttattataagggaagatataagaagattgtgttaagtaatatgttatagaatgtttaggaaagagaattttagggaaaaattatgaattatattagttgatgtaattatgtaattttagatatataattttatatttagataattattatgttttatattaatataaatgtgatatttaagatttagaatggattttatagtataattgtatatgtaaaattttgtattaatttatattgtattatagttttgatgggtattttttttttatgtgttttagtgtttttagaagtaggatttttattatgttgtaataaaaataagtattttattttgtatttagaattgtattaaaagttttttatattttatatttttatttaatttttatattagtttagtaaaataaatattttttttatgtttataggtggagagattataacgatggagataatataatttttgtaaagatatattagtaaatggtatattgtagatagaattaaattatatattttttaagtttagttattagattatatttttttagaaagaaggagaaaagaaaaagaaatatataaaaaagaaataaattatgaaaaaaagaaattaattgtgatgatagtaatttaggaaaattagttgaggtttatattagtattttaagataaatggtgatgttggtagtggtgagttgtttagagtggtcggttgttgcgggaagttgtaagcggtggcggtagtatttattgtcggagtagtggtcgtggtgggatttttgtattttatgttttttgtgtttcgcgttattgaggtatttgattgtattgtttcgatttttgagtagttggcgggatcgtttttaggtttagagtttttattatttttgcgttgttgtttttattttgtagttgtggggagggtatggagttggggttattttttagtggtttggggtgggatgtgggagtggttttattttgaggattaggttagcggtaaggttattgttttattttgtcgagggcgtttagtttttgcgttttaggaagaggttttatttgaggttttttagggttttattttcgcgggtggcgattaagtttgatgtttttgatagttaggtttcggttgggatttgttttttaaggtgtttttttcgttatatttcggcgagagagagttcggggtattttgagtgttacgggaataatttgtagagatattatttttgttttatatgttagtttgggtttagcggggggagtcgcgtattttaggttgttagaaggtgtgataggggttatttgtaggttttacggaatgggttggaagtttcgttttttcggttttttcggttttttttgtaggtagtaggagttaggtttttttacgtttttaaggttgagaaggtttttttgtttatgtaggtttgggggtgtttgtttttattttttggttttttttttggttttattcgggtttcgggtgtttattttgattttagagtggagttggggtaaagttttagtgttgttatagattggttgggtgtgtgtacgtttagggaagtgttgatatattagttttttgttattttagttatagggaagttaagggaagatgggtaggtaatatttgtagtaagttttttataggaagtatgtcgatgggttattgttttttattttgatatttgtttttttatatattttatatgtaatgtaattattaatatgtgagtttttatgattgttatttgttttttgtttttttttttgttttttttggtttttttttttttggtttttttttttatgttttaatgtgttttttaagtaatttttagaattttatttttaaattaattattttttggtttattttattgtatagtttttgtgatttatttatttattaatataatttattatagtttattggtgttgatattttattaatttgattaaagtgtagaaattttgttttttttatatttttttttattttcgtatgtataatatatatttttaattttttttatttgtattaaaattatatttgttaatgttgtagtttttgttttaattattaaattaatttataaaattgaagaagtttgttgtatttaattatatttttatttatttattgtttattttttttttaattatttaggattttttttattattatttttattttagtttaaatattttttttagtttttgttttaatataagtttgttagtatgaaatttttttgatttttttttttttaagtgtgttatggttaggtatggtggtttatatttgtaattttagtattttggaaggttaaggtaggtagattttatgagtttagggattcgagattattttgggtaatatggtaaaattttgtttttgttagaaatataaaaaattagttaggcgtggtggtgcgtgtttgtaattttagttatttaggaggttgatgtgtgaggattataggagtttgggaagtagaggttgtagtgagttatggtcgtattattgttttttagtttgggtgatatagtaagattttatttaaaaaataaataaaaaaagaaaaaaaagaaaaagaaaaaaaaagaatgttatgatggaatattttataataatgtttttattggatatatattttaggttaatattttttttagttattaaaatattttgtgttatttttgtttggtttgtatgatttttattgaataatttattgttatttaatttatttttttttgtgtatgagatgttattttttttttgttgttttcgagattttttttggtataaatttttttggatttattttcgtttgggtttgtatagatttttgaatttttatatttaagtttttgttcgaatttggaaaatagttagtttttttttaaatattttttgtgtattatttatttgttatttttttttaagattttagttatataaattttatagtttttgttatagttttatagatttattagtatgaaataatattaaatattatgaataattttataaaaataaatgtgtatgtaataaataaattatttaaaatgtataatgtattgaagttgataaataatataaaataggaagagttttatatgttatagagaaagtaagtttattttataatgtttttttaagataaaattttaggtttatttagttttagtaattatttaaaaatatttaaggaataaataatattaattttatataaattttaaatatatttgaaaaaaggaaaagtatttgtagttacgtttgatgagatttgtgtaaattttattttaagatttgaagggaattttataacgaataggaattaagagattaataatttttatgagttaagtttttaagaaaatgttagttaagtgaatttagtgatataaaagatggttattatattacgattaagtggagtttatttttgaaatgtaaggttatgtaagtatttgagaattaattagtgtgatttattacgttaattgaaggaaggagaatatatatgtaattattttgatagttatgaaatatgatttgatagaatttagtatttggttttaatttttaaaaaatttgtttttaaatttgttttaaaaaaatattttttaatttgagaaatgatagttatttaattgtatatattagttttagtagtgaaatgtttaaaattgttttttttatatttggagtattagacgagttagagaatgataatagtaagaaaaatatattaaagagataattgtatttaggtaagatggttattatttatttttgatataattaggtatttaggaaataaaaataatagataagtttatagatttaataagtaaatttaagtaatgttgttgattataaagttagtatatattaaattaattattttattgatatagtttggatgtttgttttttttagattttatgttaaaatgtaatttttatcgttggaggtgaggtttggtgagaggtattttggtcggggggtggggtagattttttattaatgatttggtgttattttagttgtaatgagtgagtttttatttagtttatatgagatttggttgtttaaagaagtgcgatttttttttattttttttgtgtttttgtttttattatgtgatatttgggttttttttttttttttttataattgttagttttttgaggtttttattagaagtaattgttagtattatattttttgtatagtttgtagaattttgagttagttaaattttttttttttatgaattatttaattttaggtgtttatttttggtaatgtaagaagggattaatataattatgttttatagtaaataaataggaaataaaattaagaaaataatgttatcgatttttttatttttttgttttttttttttattttttttaatttaaatttgtttttttttattattaagttaaaagtttatatttttgatttttatatatttatttttttataatataggtatttaaaattaaatatttttttttaaggattgttttggttgtatttcgaaaattttaaaaatttattgtagtattattttatttaaaattattttttaatttttttttgatattttttttgataagttatagattatttagaaatgtattattttatttttaaaaatttaggtagtttttttaattttattaatttgtaatttgataagattgtgtttagagaatatattttgggtgattttatttttatgaaagtaattaagattagttttatagttatagtatgtgttttattttatggataatttttgtgtaatgtaaaaaaataaatattttgtagttatgagatgttgttaatttatatgttaattataaatgttaaataagttaagatggttgaaagtattgtttttattttgattttttttttgatttttgtttgtataaagttatagagatgttcgttgttttgtatttatttttttagtttttatagtaatagtatgaagttagaaaaagttttggaaggagaattagttgatagggtaaagtagatatgtattatttaggggttttttatagattgtaatgtattatataagtttatagcgttatttataatttagttggtttgtttttatttttttataattttttttttttagttaggtttaattttttatttatgttaagatttagtagatagattaaagaataagagtggatatttgattttgttcgtatatgtggaatttgtttatttttggaatttggaatttttatattttttgatttatagttggttaaaattttaaaaataagattattttttagtttatttatttagtttagtttatatgtttttttgtttttatggtaatagtgataatttttataattttttattttttaattggtattatggtttatgatttttttttaatttatgttgatagttttatataatttatttaaagttttgaatattattgttttttgtggttatattatagtttattttttttttatttaaatgtagagagtgtttttttttttttttgttatattttttatatgttattatggatatatgaggaaaaatttatcgagattgtaataatttagagtggaaatattgtattattttaattatttatagggttatattaatatatgtttatagtgttttatatagtattaaatgttattttgtagtggtagtgtgttgttattttatatgttgtatagtttttaggatgtataaaatttttataattaagataaattaattagtttttttttttgaatttggaaatgtttttgttattttaaattgtggtttaataaacgattaattttatgtttttttgggtttatgtacgattgttttttaagatggatgtttagaatgggatttttgttgtttttattaagcgtgtgataattgtattttgagttttaatagatattattatattgttataatttaaaattttaataatatgagagagtttatttttttagaattttttaaatttttgagtttaaaataaattattgtatttgttaattttggagtaggagaattagtttattatattgttgttcgaatttggatttttttgtttattggtgagtttgagtaaatatttatatttatcgattattaggaaatttttttttatagtgagtttatattttttgtttaattgtttatggtatttttatgaatttatttattgatagttaataattttttataagaaagttagtttattgtttgttttacgtgattaaaattttttttgagcgttatatattttttttaattttgttattttttttatgtaatgaaattagtaattttttttaaatatttttttatttgtgttttttggattttgttttgtttacgaagttttattttttaaaaaagaattattttaatagatttattgaaatataatttttatattataaaatttatttattgtatatgtaaaatttaatgatttgagtaaattaatagatttgagtaattattataataatttagttttagaatatttttgttatgttttaaatttttttatttatatttaagttttattgagattttaaattttaggtatttaatgatttgttttttgtgtatataaatttattttttttagatattttaagtaaatgaaattatataatatgtaattttttgtatttaattttttttatttagttaatattattgaagtttataagttttgtggtatgtattattattttgtttgtttttatttttttttgtttttttttatttgtgtaaatgtataaggtaaagtgtagttttggtatatgtataaattgtatagtggtgacgttagtgtttttatagtatttattatttaaattatatgtattgtatttattaagtaattttattatttagagtgtaagggttgaaatttgttttgggaaaattatttttatgtttatggtgttttttttgttagataagtttagttttgtttttttttattgttgaatgatattgttttgtttggatgtagttgaattttgtttatttgtttattagttgatggaaatttggattgtttttagtttgggtttattacggttaaggttgttttgaatatttgaatatatattttcgtgaggatatatgtttttttgttttttaggtagattttaaggagtgaaattggtgggttatagggtaaatatatgttaaattttttaagaaattgttaaattattaggtatttgtagaattatatatttttattagtaatatataagaaattagaaagtttatttgtttttaaatataattataatgatgatgatagtattagaaataatatttgttttgtgaattttatattttttttttatgttttaagttttatttatttaggatttatttagtgaaagaaatgagtttggaatataatttataaaaattgaaattaaattttaattttgtttttaattttagattttgttttattagtatatttaatttaaaaaaaagtagttataaatgtatttttaaaagtaaatgtatagtatgttttagagttttatagagttagttattttttattttattttttttttaatttttttggaaaatatatttattttataaaataatatgttagtataaattgagttttaaaaataattttgtttgtttttttgtttgattgtaattgagttaatggttgatatttaatattttttatatgtgtgtgtgtatatatatttatatatatatatatacgtgtgtgtgtgtgtgtgtgtgtgtatgtatataaagatttaaagttttgaattgagggtgtttattaggaatttataggttttcgtgtggaagttaatttaaatatttataatttgatagtattataatttattatttttttatgatgaaattaatttttgttattttatttattatttttttgtttttaaaaatatatgattttgttttttttttttttatgtgtattaggtttattttataaaggttgaattttggtttgtttgagtttgtgtgattttacggttattttaatgtataagaaagtgggtattgggaatattttggaaatagtttagttgttttttataaaggtatataggagaaaggagtattttttttttgtttttgggagttgttgtgaatgaataataaatttaaagttgttgtatgggttattttattattttaggaaagttgacgtgttgtgtgtgatagagagatgagttacgaagttttaggattattggtgatgatattggtttgttgagttgagtatttttggagatgtttagttttggatttatcggttatgtgagataatgggttaaagaaaaataaagttattagatgtaattttttgttattagtagtagaatatatttttattgaaatatttattttatatattttggttttattttgtaattttatattacgagttttatataaaatgagaaaattatttttttaatttaggaaatgaggtttttttgttgtaattttgtgattaaatagaatagatataattattaatttaatatatttttataggatttatatttatagggtttatatgtatgtattgtgttgttatttatgtataagtaatatataattaaaaataagatatgtataaaaataagttttaatttgattgaaaataaaataatagtcgtttttgatagtggagaaattatgtttaaatgattattttgaaatagatttttaaattatgtatttttggatttgatattttatattgatttttagatagtatataatagagaatttttcgttttttaaatttgtttttttttgaaatttgtataagttttttgataatattatattattgaagtttttggagtgaaatattatatattaatttatagttataaatataaaatattgtagacggggtgaaaaaaagttttgattgatttgttagttggttttttattttatggttgttaagtttgttttagttgttatagtttgtttttagtttttatgtattgtttttttaaatattaggattatttttttgattgataagtaaaaattgtatagtgtatttatattgtatagaatgaagttttgatatatgtttatagtgtggaatgtttaaattaagttattttatatatgtattattttatatatttatgatatatatatgaaaattattattttattgggaaataatttttttttttttttttttttttttttattttttgtttttggagttaaatggattagatgatatttaattttatttttgagaaatatttaataatgtaatgtgtttgtggtatagggtgagtatagatgtataggaggttatagggtttaggtaaaggggagtataaaagttgaagatgaggtattgttattaaagttgtggggttttaggttaagaataggagttgaggaagttataagggaggatattttttgtagttgttgaattagtagtaattaggttttgagaaagtttttttttgtggaagaataatagttaggagggaaagttttttattttgtaaagttggggtagaaagtttttttttgaatgtgttatttgtattttagtttaggaattttgtaaaagatagaggagagtgttgtttttaatttgattttattaatagttttttttttttttttttagggatttagatgagagtattgtaggaagaagaaaaataagtttttgagttttttagagttaatagttttatagagtataggttttttttaagtggagaggaggagttttggtgtaaattgtttgattagaaatttggatttaaagttttttttattatttttgttttatgttttattatttttattattaattttagtgtgtttagagtttgtttttttcggtgggttcgtggtttcgttgattttaagaatgaagtcgcgaatttttatagtgagtgttatagtttttaaaggtggtatagattcgaagagtgagtaatagtaagatttattgtgaagagtaaaagaataaagtttttatagtatggaaggcgatttgagcgggttgttgttgttggttggggtggttagtttgtatttttttatttgttttcgtttatgttttgttgattggtttattttaaagagtattgattggtttattttatagagtgtggattgttttattttatagagtgttgattagtttattttataaatatttatttagttatagagtgttaattggtgtgtttttatagagtattgattggtgtatttagaaattttttttaagataggaaagttttgtaagtttttattcgatttagaagtttagttggttttattttttattagggaaatcgtatttgtttttaaaagaggattaaaaggtattattttttggttgaagtttagagtgttttgggaaaaagaggaaaatatatatatttaaaatttatggaagtaaatttgttttttaatataatgttttagttttagattttttatcggagagttttttgttattataatttatattagttagggtagagaggagtagaaatagattatgtgatttatgaagggtaaagtgtttgttataggatttagtgtaattttattagttttagtggtttttttttaatttgttttaagattttaaattaaaggatttttatttgttaattttttttttgtttttgtaggttataagttattatgtttttatatagtaattatgtattgatgatttttggattagtaggatattagagtcgtttggggaaagaaaggttttatttagggttatttatatattgagaattaattttagtaaagttatagttttttttttagaaaagtttatggagagagttagttattaaaggttttttatttttttgatttttgaagtagatgaatagttcggttttaaggaagagtaggtttagtataaagttttcgattttatttagtattttgttttgtgtagatttagatcgtgtttttgagagaggaagttaggtttagtgtttattttaaattgaatttttttaattgagattttaagatttagagttttgaaaatggggaagaagtttgatttataagaattaaaataattagttatttttggagaaaaaaaggattttaaattatattgaatagttataaggtttagatattaaatttatttaaatattatagttttgatgtaaggtaagagtttaatatttgatttatagaaagtttgagatttaatgaggttaagtagtttgtttagagtgatagagttaataaaaggtagagttgagattggattttttttatgttaggaaggtttttatattttttttttttttagattataataaataatttagattaatagtattagaaatttagttttagatttagaggtagtgtttggagttcggggagggtgggtgattttgatttgtgatattatggggaggtttaaaagagggatagttttttttgtttggtaggcgagattgtttttttaggaggtataggtgtttttagaaatatttatagggttatttttagtgatttgtgttgatggagatgagaatatggagtaaatgaaaataggatgtcggagaggagaaatttgatatttagggatgagtatagttttttttttggtgggtgagaaatttatgaagttagaaagttgtttattttattttattgtgagagggtttgttacgtttgggtgttttatttggtaggtgtaaatttttttatttcgaggaattgtttttagtattattagggtttggaaggtttagtttttattgtggattaggtttgtggatattattttagttttttttttttggttatttcggaattatttgattttaatgttgtttggatagaaattatttatagaatagattaggaggttatggtgttgtaggggttgggtttttgaaggatatatagttattttaggatggattaggagaaaaaaggtagagggaatgagttatgaagatagagtaagtttttttgtttggttgtttgtttgtttttttgtaaatttaggttttgattttgattaggtttttagtatagttggttatgtggttttatagtgttattagtttggaatttaattttgatagtgaggatttattagatttgagagatattgtgaaaaattgtgtttgtttttttatagtttgaaattgttatgtattgttaaagtgtttataaatttttgaaagtatagagtgtagtaattaaaattgatatttgagttaggttgtttggtttaaatttaaggtttgttttaagagtttgatttttttgtgttttaattttgttatttataatgaaggataattatattaatttattttttgggattatatgaggattaatgtatgtaaaatatataaaataatgtttgaagataatttttaatttatgaggttataaagttttatattttattttattgtgagggggtttattatatttgggtgttttatttggtatttatttattatttttgtatattttgatagaaatatatgatttaaaataatgttgatagataacgggatagagttgggtatatgacgaaatcgaatatgaatttttaggaatattatcgttatgtatttatattttagaatattatagaaatggttttgtttttgggaaggtgggatagatagaaatgattttttaaatttttatttttttagaaaagtatgagttataaagtagagagaaggattaaggaacgttattttagttttgaaagtttttatatttatatttagttgattaatgtattttttatgtaatataagtttaattattattaggtttattattgtaaaatgatttttttttttagaattatatttggattaaggtagtgtttgggattcgttatttggggtgtttatgtttaggaaaatttttaatattagtagatttttaataaatgtaattttttttagaagtaaggagaaatttggagataataatattataaaatggtagatttaagatggattgtaaattattaataaaaattttgtaatatattttattatataaaaatgtttaaatttttaatatggaaaagaatttttaaaattaatatataaattataaattggagtaaatgttgaattaaatattaataaagtgttaataattttatagtataaagaatttataaagttattgagaaaaatattaagttttcgagatattaggtagtagattattgtttattttttattaaatataatagggaatttttatagtagttattaaaattggttaataaataggttaaaataatttaaaagaattataaatgaaaaaaatataaattaaaaattaattagaaatatatatttttaaattttggtgaatgttataataaaggttaataaaggggaaagtgaggtaagttgtgttataattattatatataaaagaataatatgtaattattagaaaattattagtattataataaaatagtaattgtgttaaaattttaatttaaaaagttagttttatagttatttttattatgtaaaaatatatataataaaaaataaaaaattagtaagaaatttagatttaaagaagttttagagatgttttagaggtttttttaatttttttagaaattaatttaatgtttttataaataaatagtatatatttttattttagagattatatgaagggtgtgtgttagggatagtttggaattggtttttttatattattttaaattttttttattttttagttttttttttttaaatttttattttaattatatattttttatattttttttttttgtatttttaaggattcgagataattaaggttatttttttttttagtcgttcgtatttattttttttgttatttttttatagagttttttaagaataagaagtagtttttttttgtttttttttttataatagttttatagatatagataaatttatattttatatatatatttgtgtttttagaattttttgtttaggatagagaggattttaaatgtttatagatggcgttttttttttttgtttttttgttttttttttttatatatatatatatatatatatatatatatatatttagatttttagtttatagggatttaggtttcgtttcgcgtcgcgtttatttcgtcgttgtattgtgaagttttttataatttcgtagttgtgtttgtagtagttgtttattcggtttcgtttttgttttaggaggtttttttggttgttttagtattcggtattaggtcgttttagtttcgttatcgttcggaatttttttacgtcgttgtcgaagcgtacgttttttttttggttatggaagtatttgtttaggtatcgtattcgtttcgttttattgaagaaatgatatttagacgtagagtattttaagaaacgtgttgtggggatacgaacgatttagttatataggcggttttttgagaagatattgatagtgacgtcgttattcggggttttttgggtggggtgcgggtattgggaattttaatcggttttcgtcgtaacgtttattattagtagtttaggggttttttttttgtttttttgaggcgaaagggggtttgggggattaggcgggaaaattacgtttgatttttaggtttttgggatttttttttttatttttagtttgttttggagatttttaagtaggagttggaggaggattcgtttagtatcgtagttcgcgtcgtttttttttgggagtttttattttaaagatattttgtttttttttttattttatatgtttatcggttttttaaatagtatttatcgcgtttattttttgaatttttttttagtgttgattttgtgtttggtttgcgttgtttttaggaatttaaacgagggaaaatagatttttttatttcgttgggggagtttaaagagtagtgaaagtgatggtttaatattaaatatataagagtttagataggaatgagaaatgtcggaagtgtggagttttagaatagagaataataggatgattttaattatattagggtgttagagaaggatttttttaatagtgacggtttagatgtgatttgataggttaagtaggtgtgagttagggggtagagtggagttcgtgtttgtttggataaaacgggaggtatattttaggtttaggaaattttatgtataaaagtttgaattgatgaatttttttaaaaaattaggagaaagtttattaaagtagagaggttgaggggaaggagggtaatagattagttcggagaaattataggagttaggtattgaaaagttttttgggtggtgttaggattttggatttatattaaggataattggaaagtatagaagagttttaaggagaataaaattatgatttttgtgaatgtttataaatttttttttgtatttttaaatttataaagtttagaaatttagttaaaaaaatttgtttttataatttatttgataagggtaagtggtcgaaggtgttttagagtttttattggtgatatgtgtttttgtatttttaatatatataaatatatatatatatatgtgtgaaaatatgtatatatgtaaaatattatatttttgatgtttttgtttttatgtttgaagtgtgaaaatgataaaaataatttaaaaataatttttgggtaaaagcgaaatgaataaatagaagtattttatattgtgaataatattaaatgtagaattattatagaaatttgaggtatgttagtgagaaataattttagtagtattattatttgtgatttataagggtaagttgttgaaagttaatagagatagtgatgatcgataatttatgaaaatgttgaaaaatattgtataaggtaaaaaataaatatgaaaatattgagtttgtattgattaaatggatttaataagaaagtggttgaatttatgtaattgtttaattgtttataatgaaataagtaaaaataaaagattaaattgtgtggtgagtgtataatagatgtgagtttagaatttttagaaagagtatagtgtgaattagtgtttttagttttagtattattgatattttggattagataattttttgttgatggtagaggttgttttgaatattgtgggttttttagtagtgtttttggtttttatttattgaatattagaagaaatttttgtttgtgataattaaaaattgttttaaatattgttatcgttttttaacgatgatgagagggaagggaggggtggtgaattatttttgggtaagtattataggtgtgaattatttgaaaaaatttgtgttgaataagttattattagttatggagtagttgagaattgtattgaaaaatatttgttgaaaattttggttttatgtaaaaagaaggttttgtagaattttgtttttaatatagtgttatttttttagaaaatgaatttgatgagaattaagatttaatgatttttttgttttattaagtagttattaattatattatttattatttatattatttttttttttaatttttttgttattggtttattaattatttgtagtaatgagttataattatagttattttattttcgttaaatgttttaattaatttattttttttagttttttatttttaataatattagtaggtattaaattattagttttggttagaggtagaatttttggttttgtagttaagttttttcggaaaggaggaaattaagaaaatgatatttttatatagatattttataaaaatgagtagttttttagattgtgagtaagatttgtagaaatttttttttgttttttagaaatggtggtagagaggtgtgtattttggattaagtaatgtttatttttttatttttaaattatttaagtatttttttatagagaaagttaaaaataaatatgtgtgaagttgttgttatcgtggtttgtatggttagtattgtaatttatgtttatgtgttatatttagggttgatagatgtggtaaataaaattagaggatgtttagttaaatttggatttttaataaattatggttttgtatttgaaatttagattttattaggaatatgtattttatttggtaattttagtttaatttgttagttaaattttagaagaaggagtgatttaatatttttttgtgttttttaatatatgattattatagatatatagaatttttaaaatgataaatgtaaaatgaatgaaagtttttttaatatatcggaattagtagtttttgtatttttatttttattttaagaaataatttggtatatatgaatattagaaattttgttaataatttagatataatatagttattatttattaatgatggataaatttttaaattttagaattagaaaatttgaataaaaatatgattttttttatttgggttaatttttattaattataagtttttttgtaatttattaaatgtatttaataatagcgtaatttttacgagattattgttaagtgtaaaattaaatgatgattttttttagtattgattatatatttaaatatatttttatttaaatttttatgatttttataattatagtttatattattttttgtattttttaattttaaagtaattattatttttattatgattttgtagttgttttttgtttttttatgagttttataaagaattgttattttgaaaatatagggtagaaatattggtttatgtttaataatgtagtttagttaaattttatataaaaggtatttgttgatatagaagaaagggattttttatatgtttagatttaaattgtaatttgatttttagtatttaatttgtaatattgggttttatttataattttttaattttagattttagagatgtatatgtttttaaatattatagatatagtaggattattattgaaattgtatattgaaatttataggtttggtatatagttattgtaaaatgttatatggtatatattgatggcgatcggatttattttatttattattttatttttatgatttagagtaataattggtatattttatgttattaataaatattagttgtgtgaaatattggttgtgttaaatattggttgtgtgattttttgtatgagtagttattattgtatataggggttttttagtattttttcgttaataatgattgagtatttttggtttataggtttttttgtttttttttagtttttttagttttttttttttgatttagttggttttttgaatttagagtgtagtttttttttgaagttttttatttaaaatagttaattttaattttatttttatttttattcgttttttaaattgtttaatttagttttttttttggatattttattgattgtaaatattaattttattaaatttagtatttgtttttttgttacgtttttattttttttttcgtttagtggtatttattataattggttttttttttttttttgaaaaaaatttattttttttgacgtatacgtattatgtttttttgatttttttttaatatttttgggtttttttttagttttttttgttggtttgtgttttgtttttttttttttatataatttatttttttatgtatttttttttattttttggaatttaatatattatacgtattgatgtcgttaatataaatatttgaagttttagttttattatgagttttttaaatgttattgattttttgattgttttatataaatgttaataaattattttaaatttaaataaaatttttatttttaattatttattttaaataatttttttttatagttttttttattttaataaataatattattatttatttatttgttaaaataaaatttttaggaataagtttgattgttttattttttttatagtaatttattaataagttaaggaaaaatatatgttaagtttgtttattttattttttttatcgtttttattattaatgtattttatgaagttataagtttgttttcgttggagaattttttgttgtgtttttaaatagtttttttgattatttgtgaattttaatattttaatttttatagagtagttagaattagttttaaaaattgaatataggtcgggcgtagtggtttaggtttgtaatttttgtattttgggaggttaaggtgggtggattacgagattaggagatcgagattattttggttaatatggtgaaattttgtttttattaaaaaatataaaaatttagttaggtgtggtggtatgtatttgtggttttagttattttggaggttgagttaggagaatcgtttgaatttagaaggtagaggttgtagtgagtcgagattgtgttattataatttagtttgggtaatagagtaagattttattattaaaaaaataaaataaaataaaaataaattgaatataaattgattttttttgtaattatatagtagtttttcgtatttatttaaataaaatttagttcggtcgcggtggtttatgtttgtaattttagtattttgggaggttaaggtagatagattatttgaggttaggagttcgagattagtatggttaatatggtgatattcgatgtttattaaaaatataaaaaaataaaaattagttaggtatggtggtgggtgtttgtaattttagatatttgggaagttgaggtaggagaattatttgaattagggaggcgaaggttgtagtgagtcgagattgtattattgtattttagtttgggtaataagaacgaaatttcgttttaaaaaaaaaaaaaataggttaggcgtggtggtttatatttgtagttttagtattttgggaggttgaggtaggtggattacgaggttaggagatggagattattttggttaatatgataaaatgtttttattattaaaaatattaaaaattagttaggcgtggtggtaggtgtttgtagttttagttattagggaggttgaggtaggagaatggtatgaatttaggaggtggagtttgtagtgagttgagattacgttattgtattttagtttgggtaataaagcgagattttattttaaaaaaataaataaataaataaataaaataaataaataaataaataaataaataaaataaaatttaaattttttatcgtggatattagagtttataatgatgaggtttttgattttttttttgtgttttattttattttttgtttttttatttttttattttttatatattagtttttttagtcgtttttttttttttttatataattttttatattagggttttttttttatttggtttttttggagttttcgtttattagatttttatgattgtttatttattttgttgttttagttgaatgttatttttttaggtagagttttttaaatatatgaattaaagtaggtgaatttatgttttttttttttataaatttgatgttttttttttagtgtattatgattttttaatattttattttttgttaaatgtttattgggttagtgtttgttttttttattgttgtgtaatttttatgagagtcgggattttttttgttttaattaaatagaatgatttgaatttagaatggagtcgagtatatagtagttgttaagaaaaataagtgtggtttatatgaataaattagggtatgggaagtgataattgtggggattttggaaagtaagaaggggtttaaattttagtatttttttattttgatgttatattagattttttttttttttggtgagaaatataggtaaattttttttttttttttttagttggaagaagaatttatagataaagaaatagtgatttaagaaaaaggatttttttttattgagagttatttttttttgtttgggtatagtggtttatatttataattttagtatgttgggaggttaaggtaggtggattgtttgagtttagtagtttaagattagtttgggtaatatggtaaaattttatttttattaaaattataaaaattagttgggcgtggttgtttgtttgtatttttagttattttggagtttgaggagggaggattatttgagcgtgggaggtagaggttgtagtgagtttcgatcgtattattgagttatagtttgggtgatagagttaggttttattttaaaaagaaaaaaattattttttttaatggattttatagtgttaaggatttgtgtaagttttagagatttttggaaatgataataatatagttggggaaaaataagagagaaattggaggaagaggtaagtagatatggttaattaaggaaagttgagggtatgatgggtgaatttatgaaatttaggataagattttagtaagataatgagtttttaggatttgtttattgatttttagttttatgagatgtgaataatgtttatattgtttcggtaattttatatagagtatatagtttgaatattattaaatttttgatatttgattatttttgatttataaaaatagaattttatataatttatattacgttagttaaattttttttgttatgtttagttggagtatttaggagatgtaggagaaataagtatagaaaggttaaaagagatttataataaatattaatttgggttaggtttttagaggatgttttaagttttttaggtattaaagaatattttataaatgttttgtatttgtaaggtgattttaagtattaaagattttagttttagttttagggatttttttttataagaaagaaagagtattaagtataatttttgttagataatttatatatattataggggtataggttttataaatattggagtttagaaagaaaagaaagtagataatggggaggttattgggtttatttttatatatgaggaagaggggttaatattaaaggttttgtgggtgatataatttaggatcgtttaggagagattttttaaatttttttgatttttataaaatttttagaaaaaattttttttgtttgatataagttaatataataaaggtaagtgttgtatggggaatttattttagtatttttatttttaaattttttaaagattttgaggatatgtgatgtaaaggttttattggtggagatttgagtagaaatgatttgtatggaggttttttatataagttttatggagtgggtaagtagttaagttttttttgtggtggggaaattatttgggatttatatgataaagatgggtaatttttgaaaaatacgttataattttttaaggtatatggtttgggtataatgttaataaaattttttattttttttattttatagtagtttagtatttataatgtgtatttacgtttggtgtttttagttaaagttagtggggagtttagtattattagtgttattgttagaattgttatgtaggagtttttagggagttttagatatattatgttggagaataggataggattaggggttagagtagtaggtaagttttatttagggagaattatgaatttttttatttatattttaagttatagggagtaagttattgatttttttgtttttggattgggtaatttagtgttggagaacgaattagtatttgagtttaatagtattattagttgttggttagagatgttgtatgaaggtttttttttgaaatagaatttttttttttataggattgtttttagtatttgaaaggtttgaattagttgtatgtaaaatattttaattggggcggtatttttagttttaattattttagttttgtgttggttagtgatgtgtttataagtttgagttttgtaagagtatttattttttatttgataagagaattgtttgtaggagtgagtgtgtttaggagtaaaggagatggaggggatatggttgtaaattaggagattttaatttggttttgttgtattatattttattgttgtagatttgtgaaaattatattatgttttatagttgaaatgaaggtatcgtgattttttaggttttttaatattggaaaatgtgattttgtggatgttttagggagtagtagttttgggtatttgatgatatgatagaatgatagttgttgattggagagtgtaatttttatttatttataggtagagatgtttttaataagttaaaggaaattgaaagttagttaataatttaattttagtaaaaagagtttttttaagtgtattttttgatgttttttttaagtttagtggtatttttagaatatatataggtaaggggtttgtaggggttatttatatgtaatggagggtttgaatgtgtttttgtatagtatttattttaataatgcgataaggttaattgtgtaatttaagtatttatgggtttgagagatcgattaaggatttaaagttagttgttgatagaataattttgttttaaaataatattttatgtgaagagtgtttaattttttatttttggtttttattaggatttttttatttgattgagattatggttttttattattttattttttttgttttatcgtaagggaatatataagaagattttgttggtaggacgtggtgggttatgtttataattttagtattttgggaggttgaggtgggtagattatttgaggttaggagtttaagattagtttggttaagatggtgaaatttcgtttttattaaaaaaaaaaaatagaaaaattagttggttttggtggtgtatgtttgtaattttagtttttcgggaggttgaggtataagaattgtttgattttgggaggtagaggttgtagtgagttgggagtacgttattgtatttcggtttggttgatgcggcgagatttagttttaaaaaaaaaagattttgttaattaatacgttatagaatgtttaggaaatagaattttagggaaaatttgtgatttatattagttgatgtaattatataattttaaatatataattttatatttagatagttattatgttttgtatttatataaatgtagtatttaagatttagaacggattttaaagtataattatgtagataaagttttgtattaatttatattttattatagttttgataggtagttattttttatgtgttttagtgtttttaggaatgggatatttattatgttgtaataaaaatgattaaaattttttagtaatttttgagtattttgttttgtatttagaattgtatagagttttttatatattatatttttaattaatttttatattagttgaatgagggatataatttttttatttttataagtgaagagaataaaatgatggagattaaataatttttgtaaagatgtaaggttagtaaatagtaattcggttttttaaagtgttgggattataggcgtgagttattacgtttggtttgtaaaatttttttatatttttttttacgataaaattagagaagtggaatagtaaagggttatagttttaaataaatgaggaaattataatgggaattaggagtaagagattgaatattttttatataaaatattaattattttaaagtagagttgttttgttaattttattgaattaagttattatatatgtaattttaaattttttaagttttgtcgttatattatattattttatatttaatttttaaagagaattatgtttattatattaaaattatttttattattttaatttatggttgtgtaaattagtaagattattttttttaatgaatggtaatattttatagattttggggtagatattttgtagtaattttagttattttaaaagattttttttattattatggttatttttttttggaaatgatataatttgcgtttatgttacgtaaggatatttatagtttttgtttttattttgtaatattaaggtgaattttagtttttttttttaggttattatattataattagttaattagttaattaggtaaaaataagtaattttatattaagaatgtattaaaatatagttaaaaggaaatttttaaaatttgtttatataaatttgatatattatttataaattatataaatttatatttaaaaagatggttaatggtaatgaattaaattttgtatgttttatatatttatgagtaataaagatgttgttttagtttatttgtgttgtgataaaatatagtagattgggtaatttataaagaatatatggaggttgagaagtttaagattaaggtattaataggtttaatgtttggtaaagggtatggtcgttatttttaagatggcgttttgtattttttagaggggatgaacgttgtgtatttatattgtagaaggtggaaggatgagaggttaaaaattgtgtgaagcgtgttttataagggttttaattttatttatgagtgaggagttttatttgaattttaaaggagatatatttatattataatagatgtgtttttttaaattatatattttatatttttttttaatatttaatataaggatagtttaggttaaataatgtagtaatttttattaaattattagttatataggtggtttaataggttgaatttttttacggaaaaaagagaataatttttttaatttagttggttgtgagaggtgttaaatatgagagtttattttttgaggaaatgataattaaattggtttttggaagaaagtggtttttagtacggaatttttatggtttttggttttgatgtatgaaattataggtttggttttacgggaaataaattttaatatttttaggattaaataggtaaaatcggaagtatagatttttgttgaataataggtaggttgatattggtaggattatagtatgttttgagttttattgattgttatagaatggggtttatttgtagtaagtttgaaagtttgtaatatattttggaaaaataggtttttttggttattagtaagttttagttattatagaatgtttgttatttgtttaagtagttttaaaatgtttttaggggtttttagaaagtaattattattaatttggaatttaaagtaaaaagtaggttattaatttttatatttaaagaaaaaatgataataataataaatggataaataggattagtttttttttagtatggaagatatgtattttgaaatagaaaacggtgttatttaaaggttttattagtatttattatatttgataggattttttttagtaaaattttagtaatgttttttattgaggaattttggtagtgttaattattatattatgatattatttaggttagttgataggatttttttaatttttaaatgttattttttgatttaatttagttgttttataatagaatgtttgttattgtatagttaatagagagaataattagaatttttataggtttttgtattaatattgtaagtataaagaattttttttttatttttgtttttagattttatgttaattgtattgcggtaagtatttatttatttatttagtttaaaataggttagattattttttaaaattttattttggtgttttattagtttattttttagtgattgtagtgtggatagtgaagaaattgatgaatttgttgaattgtattaattttttaatttgttttataaagtgtgtgtttggtttgttgtttattttatttaaaataaataataaaattttttagtagttatttttttaatagtttatttttgtagataatttattattttgaaaaagtaaatttattagtatttatttatgttaataatattttatttaaataaaattaatttatatatgtgtaaaaaaattaacgattttttttgttatgatatttttttttattttgtgtgtttgttaaataaagtaatttttagtattatatagtagttttgagaaaaataaagtataagaattatattaattattgttagtatttttgttttggttttgtgtttatttaaggggtatattagtaagataaaggtggaaaatttggtattattacgtattaatttagagatgttaaagatgatttgggtgtaaataaaagtttgttagtatttatagtttagaattttggatttgattttaaggaggtgtttagttaattgttagaataagaaaaaaggtattagttagtaaaaaataatttaagttatagttatataattaattagaagaaaatattttataataattatagtagaagataatataaggattattcgaaatttttgagtttttttagaagtgaggaatttttattgttattataagttttaaagttatgaaaaataaaaaagtataataagaattagttttaaaagtaattggtttttttattgaggtaaaatatatagatatgggtttattttttttttagaataggatttaaatatttaattttttttttttttttttttttttttttttattttttttgagatagagttttattttgttgttaggttggagtgtagtggcgtgattttgtttaattgtaatttttgttttttgggtttaagttatttttttgttttagttttcgggagtagttgggattataggtgttcgttattatttttagttagtttttgtatttttagtggagatggggttttattatgtttgttaggatggtttcgattttttgatttcggttttttaaagtgttgggattataggcgtgagttatcgtgtttagttttttaaattattttaattgtttatattttttttagtggtattgttgatattaattgtaatattattaatattgattatggtttttttatttgtagatttatagttatgatttagatagtgttatggtgtaaagattggttttatttaaagttttttaatggaggatattgttgaaattttattggaaagggttttattaattttgatgaatattaatatggtttttaaatggtataggtttttgttgaggatatatattttttatggtaagaagaaattgattttgtttatttgtttattgttgtgatttttttttagtaattttatattattagaaattaatttgtgtttttatatgggtaattaattggagtgtttatttagatagattttagatttaattttttttaaagggtttattttttaattttataatattggggtttagtatttaatatatgattaggagggaatataaatatttagtttataatatttttttcggagatatatttgtttaagttttttgtttattttttaattaggttatttgtttgtttggttggttgttttgtttttgagttgtatgagttttttatatatttttgaaattagttttttattaaatatatggtttgtaaatatttttttttattttgtaggttatttttttattttgtttattgttttttttgttatgtaaaagttttttaatttcgtttatgttgagtgaaataagttagttataggaagataaatattgtagaattttttttatatgaggtaattaaaatatttaagtttatagaagtagagaatataatagtagttaataagagttgggggttgggggaaatggagcgttgttattaaaagggtataaagtgttagttatgttggatgaataagttttagagatttgttatttaatatagtgtttatagttaataaaataatgttgtgtattttaaaatttgtttagattttttttgtggttttttttttttttatttgttttggagaaagtttaatgtgtgtttgagaagaatgtgtattatatttaaaatatgttaaaaaaatttattaaaacgttattagaattaataaatgaatatagtaaagttgtagtatataaaattaatatataaaaattagtagtatttttatatattaataatgaattatttaaaaaataaattaagaaaataattttatttataatatttatgaataatataaaatttatatggaattatataaaaagtttgaatagttaagataattttgagtaaaaagagtaaaattggagatattatattatttgattttaaattatattataaagttatagtatttaaaatagtatggttgggtatagtggtttatgtttgtaattttagtattttgggaggttgaggtaggtggattataaggttaggattttaagattagtttggttaagatggtgaaattttattattattaaaaatataaaaattagttgggtatggtggtagttatttgtaattttagttacgtaggtggatgaggtagagaattgtttgaatttaggaggcggaggttgtagtgagttaagattatattattgtattttagtttgggaaatagagtatgattttatttaaaaataataataataataataataaaatttagtatggtattggtataatagtagatatatttattgatgaaatagtatagaaagtttagaaatgaatttatttatttatgattaagttatttttaataaagttattaagaatatataatgggaaaaggataatttttttaattaatagtgttgagaaaattggatatttatatgtagaagaataaaattggatttttattttatattatatataaaaattaattaaaaatggattggagatttaaatataagatttgaaattgtaaaatattagaagaaaatagagagaatttatataatattggtttggataatgatttttattttatttgattttagaattttaggtaataaaatttaaaattagataagtgggattatattatattaaaaagtttttgtataataaagaaaataatagaatgaagagataatttatcggttgggagaaaatatttttaagtaatatatttgatgaagggttaatatttaaaatatattagaaatttttaatagtaaaaaaaataaaataaaaaaataagatttaaaaataagtaaagaatatgaataaatattttttaaaagaagatattgaagtggttaatagatatatgaaaaaatgtttaatattggtgggtgtagtggtttacgtttgtaattttagtattttgggaggttgaggcgggtggattatgaggttaagagattgagattattttggttaatatagtgaaattttgtttttataaaaaatgtaaaaattagttgggtatggtggtatacgcgtgtagttttagttatttgggaagttgaggtaggagaattatttgggttcgggaagcggaggttgtagtgagtcgagattgtattattgtattttagtttgggtaatagagtaagattttgttttaaaaaaaaaaaaaaaaaaaaaaaaaaaaaaaaaaaaaaaaagtttaatattattaattattagggaaatgtaaattaaagttataatgagatattattttatatcggaaagaatggtttttattgaaaaggtaaaagataagtgttggtgaggatgtggagaaaagggaatatttggttaggtgtggtggtttacgtttgtaattttagtattttgggaggttgaggtgggtagattgtttgagtttaggagtttaagattagtttgggtaatatggtgaaattttgtttttattaaaaaatagaaaaaaagaaaaaaaaattagttgggtatggtagtgtgtgtttgtagttttagttatttgggagtttgaggtaggagaatagtttgaatttgtgaggtagaagttgtagtgagttaagatcgtattattgtattttagtttgggtgatagagtgagacgttatttgaaaaaaaaaaaaaaaaaggaaatatttgtatattgttggtgggaatgtaaattggtatagttattataaaaaattgtatggaagattatgaaaaaattaaaagtagaattattatatgatttagtaattttatttttaggtttacggattaaggatttaaaattagtgtgttgaagagatatttgtatttttatgtttattgtaatgttatttataatagttaagatgttaagcgtttattaattgataaattttttaatgtggtatatatatagaatatattttgtgtaatagagtaatatatagttttttaaaaaaaaagttgttttgggtcgggtgtggtggtttatgtttgtgattttagtattttgggaggtcgaagtaggcggattacgaggttaggagattgagattattttggttaatacggtgaaattttgtttttattaaaaatataaaaaattagttaggcgtggtggcgggcgtttgtagttttagttatttaggagtttgaggtaggagaatggtgtgaatttaggaggcggaggttgtagtgagttaagatagcgttattgtattttagtttaggtaatagtgtgagattttattttaaaaaaaaaaaaaataaaaaataaacgttgttttgttatgtgtaataatatgaatgaatttagaggatagtatgttaagtgaaataagttagacgtttttaagtgaaataagataaatattgtatatttttatttatatatggaattaaaaataattaaatttatagaagtagatagtagaatagtgattattagaggttgtagattgggaggaataggaagatattagttaaagagtataaagtagtagatagataggaggaataaatgaaaagtttttaaggtgatgtatatattaattagtttgagttaattattttatattgtgtatatatattataatattattttgtattttataattatatgtaattataatttgttaaaaaaatataataatttaaaaaattataggatggaataaggtttttatatttatgggaggattaggataaatttttaaatattttttagaggtatagttgaggtgagatatgtattgaaagtaaaaatggaggttgggaattaaatattaggtattttttgtgtatgtgtttatttaataattatgttaatcgatattttttttattgttttttatttaaatgtagagagtgtatttgtattgtgattaaatagagaagaggttgtaaaaagtagggttattttgatatttatttattaatatttatgaataaataaatatgtatatatgaatttatagatatatatatttatatttatataaataattttaaaagtgtttatttttattttaagagaattaaggatatttttgtagatattagggtagataaaagatggtaataaagaaaagggaaatgagaaggaaatatttttgtaagtgtaagtgttggggagaaggagtgggagttggggggaagttgagaattgtattttgtgataaagagtatggtttatggatagtagtatatgtgagttatggaaggataataagatagggagaattagttaagatggcgttttagttagggttattagtgtttagatagaaagtaaagtaatagtttagtagtcgtattgaatgggaatagtgaatagtgtgaaaatgagaaaatattggggtaaggttattgatttttataggatgttttagtaaagtttttgattaggtttttaaattaaatatatggttgaggttagtttttttttatttaatggattttagtatttggtgaggaaatgaggaaaagagaggtttcgaagtaagtaattgtatgaaatattaggatttagttttgataagattgtttgtggatatattagaagagtaggagagagttttagaagatttaaatatttagtatttagaaggttttttgaaattggtaattaaattatgaagtgaggattgatgggtattattgagaatatgatttgggagtcgtttaattttttgtttattagttagtttatttttttgttttttataaaaatgtagttatttgtttttgtataggagaagttgttgtgggagttatatagagtagtaatagttagcggtaatttggtgaaaataattttgtagaagggattgttttttttttatatatttttatatataaatttttatagttagaaaaatatttttaatatttatttcgtatttttgtcgtattttgaattcggtaaattttaattgaggatttattatatgtacgtgtgtatacgtatgtaatttaggtggggatatttaattataaaaagtgtgtttagtgttttttttgtgtaaaagatttttttaatgttggggatataaagatttatatgaattagattttatttttaagtagattttatatagataaaagagcgtatagtagtaatagatatataaaatttatataaaaatgttataagatttataatagatatatttataaaaaataattaaatataatttggtgttattaatttttaagataaaaattttaaaataaaaatggttaaaattaagtagaaatttatatttataataagaaggaagtatttgtatagatgtaagttttagaggaagtgaaatttagaatatagaggaagggttacgttttaggttggttagagattcgttggggaataggaattattatgaataacgtgtgtgtaggaagtaggaggagttaggaaacggaaatagagatagaggggagtttgttagattagaattgaaaggtttttttaaataatgttgggagattagagtggatgtgtagagttgaagttttaagaaaggtattgaaaatttggtaaagatgttatattttttagaaagatgtggatggacgtaggaaaaaatattaagtagtaaaatttttataatttaaggttagttatgagggattggatatagagattagtgtggtgataatagaaatggatgatgggaatattatgttttttttgtatttttagatgtgtattagaattggtatttgatgaataagggaggaacggaaggttttttagaaggaatatattttttttttttttgtaggtaatatttaaagggattaatttttttatttatttgtgtgttggttttttttttttggttgagatattttgtagaaaaaagagagaaatttattggaaatttttatttttttataaatagttgttgttgtttttttttataattaatagggataaagattgaagtaatattatttattttcggtagatatatttgattagaaggttttatataaagttttggagagaaggtgtaggagaataggatgattaaattaggtgttgataagaaaggttgataattttttttgtggaataaattaggatataagtagttagtaaataaagaatatttgtagagtaaagtaaaatgtgtagtgaggattggaggagttgggtatttagagtgatagagatataatgtttggttttttatttttgtttttgggtagtattaaaagtataaataaaaagttattttgttgttatttgtttgttatttttgttatataagagatggagattgttagagagatttattatgttaattttgattgttataggtttatgtatagataaatgaagggaaaataaaatgatgagttattgtttattttatattaggtattgaattttttatttttagatattttgttttatttgatttttattataattttgtagtggatgtatgtattatattatgtttttatttaattgttatatttttaatatatttaataatgtttattatttatagtatttaataaatattgataatgattgggtgtggtggtttatatttgtaattttaatattttggaaggttgaagtaggtagattataaggttaggagttcgagattagtttgattaatatggtgaaatttcgtttttattaaaaatataaaaattagttaggcgtggtggcgggtatttgtagttttagttatttaggaggttgaggtagtagaattttttgaattcgggaggtggaggttgtagcgagttgagattgtattattgtattttagtttgggtaatagagtaagattttgttttaaataaatataaataaataaataaatatttatttattattgggatatgattaggaaattaaatgtgttatatttttaatattgtatagtgatatagaatatatatatagtaagatatgtaaagtataaatgtataatttaattaattattatagtgttaatatttatgaatttattatttaaattaagaaatagtatgaggttagtattagaagtttttttttgtttttttttgtttatattgttttttttttttattaagataatttattattagatttttatagtaatttttttattgttttttaatacgtttttaaaatttaatatttatttttaaatatgtttagtaatattatataaattaaattatatagtatgtttttttttgtgtttattttgtgatttatttcgtgattgttaatttagtgattcggaaagaattagtttgttaataaatgttgttggattagttgtatatttttattgaaaaaaaaagaaagaaagaaatttgatatttattttattttatatataaaattaattttagtagaaaatatatttatttataaaaattaatataataaaatttttagaagacgatattagagaatatttttttgattttgaagtagaaaaagatttttaaaatagaatttaaaatttagaattataagaaaaaggtttattagtggttataaatataatgtatttaaaatagggatagtaagaaattattgggtataattagtaggtgttatgggatgtgtttggaaagttttttatgacgatttattatgagtttattatattcgtgttaggagttttttattaggggttttagtgtttgtggttaggaaaatagaaataagaataatagcggaatgtatttttaagtattttggaagttatagaagggaaaagggtaggaaaatcggaaatatcggtatatatgttaatgaatgtttgttgtagttaaattgaagttgaaggagaagatggagtgaaggatattggaagcgggggttttaggaatagttttgtgattcggttggtattttttgtatatagttttagtttttgttaaattttttggttattaaattgtttttttttatatgttaaggtaagttttattttttttttgattttagaataagttggtagaggtttttatagagtgataaatatttattgttttttttaggaaggcgattaattaaaatatgtatatatttttataagaagtatagagtataattgattataattgatgatatttaaagagtaaatgtttattgaacgttttttatgttttaaagagtgcggtaggagttaaggttttagggtgaagattttatgaagattaatatatattaggaaaaaaagatatatatagtatatattttatatattaggaattttttgtattattttttttttagtttttagaaaaatatcgggtttaaaatagttattaatagttgttgaattaataaataatatattaagtataaatataaatatttataaattgtaatgaaaatataaatgggggttgggggtggtggtttatatttataattttagtattttaggaggttaaggtaggcggattgtttgagtttaggagtttaagattattttgggtaatatggtgaaattttatttttattaaaaatataaaaaattagttaggcgtggtggcgtacgtttgaaattttagttatttgggaggttgaggtataagaatcgtttgaatttaagaggtagaggttgttgtgaattgagatcgcgttattgtattttagtttgggtaatagagtgaggttatttttgaaaaataaaaataaaaaaaaagaaagagagagagagagagaaagaaaggaaagaaagaaagagaaagaaagaaagaaagaaaaaagaaagaaggaaagaaagaaagagtgggtataatttaaaagtaataaaatttaagaatagtagataaaggatatatttatatagattggagtatttggagaaaatttgaaaatatagttcgtttgtagaagtaagatttgaagtagagaagaggaggaaatgatttcgaggaatagtagtgggaaacgaattattatgaattgtatgagtgagagtagtattggtagcgggggtgggatagggagtgggttgatttagggaaaagtttagattgattggagtgaatatgtagattaaagaatagtataggataagagaagatgtatagagaggatttgtttttatgagaggttttagaagttgagtagttattttttaggaaggtgatgaattgaagtgtgtaaatgtaaaatagtaaaattatttgttggtaaggtaagtgttatataggtataggaggagtattaaggttggggaggtgatagtgagattagggtattggttttattgagtgttttgtgtttttttaaatttgtgtaaattattattatttaatgggtagaaagagaaaatgtggaatttttttagattttttttttttttttagagatagtatttaaagattgagtttttaaatttttaggttggttatttattttggtttttagattttgtgttttaagatgaagtaggttagttttttggataaagggattttataaaaatttttattatttattagttttttttttatgtaattattgagtgaagtaatattatttgtttttagtaaataatattattttaatagttttagtattagtttggtttcgagattttgtgaaaacgtggagtaggggtaaattattagttatgtggtgcgagaaagatataatatttgaaatttgtcgaaagaaataggtgatagttgtgtggattgttaagaatttttttttttttaagtaagatttagtatgtttaatgaatgtagagcgtgaattaggatatttgtttttttttagatataggtggaaagtttttgtttaggattaaatgaaaagaaaattgttttaatgttaggattttattattggtagaaaattaaaatttgtggtagggataaaattgaaaggaaagaagaaatagattgattaagggttatttttttatttgttggttataagaatatgtagggataatgatggaaaagagaattaatggttttagggtttggttagttattttttaattattttatttaatttttataataattttgaaaataattttttgtattttttttggaggtgatggtagaaatatgggaattatattttgatttgaaaaagataatatttatttttttgggggaatattaaaaagttaatattgttgtatttgtgtaaattattttttaaggttatgtattattaggataaataggatttgtagattttgttttttaggagtttaaagttaatataaatttgttataatatattgtaataagcgttataattgattggtttataaaatataataagagtataaatttgtgggtttttaaatatgagttaaattgttaaaatggtttatatattgatcgggcgtagtagtttacgattgtaatttcggtattttgggaggtagagataggtagattatttgaggttaggagtttgtgatttgtttggttaatatggcgaaatttagtttttattaaaaatataaaaattagttgggtgtggtggtatatatttgtagttttagttatttgggaggttaaggtaggaggtttgtttgagttcgggaggcggaggttgtagtgggtcgagatttcgttattgtattttagtttgggtgatagcgagatttcgttttaaaaataataataataataaaatgttttatatatttatatgaattttaaaaattaaagattggagttttttatgtgtatgagatagtaatatttattaaaaagggtaagtttggttaattaagatagtagaaggggtagagaaaatataatgaaacgatatgtaagggaaacgaaggatgaaagatgtaggtcgggagaggagtattgtttgatgggagtgaagattttttttttaggaatggaaggggatgtatagagtgaagttatttaataaaaataagatttgtatagttatagatggaagggaaattaattaggaaattattttggaaattttagtgtagttataagattaggaagtaatggttagaatgaagaggttggatttattgagtattaatatttttataattatgttaggaaatattatttgataaagagagaaagatgagtcgttttagaaggaatatatttttttttttagaggtagtatttatagatagtttttaaatttagaatttgttttattagttttagtttagtttatttttttttggggaaggtattttagttttttgtattaggtattttaagaaagaaaagtatttttggaaatttttaatttgttataggtatgtttttttaattaataggaatagagaatgaggtagtattatttgtttttagtagatatgtttgttaagaaggtttgatttgattttatgttttggggaggaggtagggaaggagtaggatgatttataagtagtgagaagaatggttacgatgtagttttacggaaagaaataagatattttatgtggagagataagatattatattttgtagttgtgaagtagagtaaagattgagatttttagtatttagtgttggtgggggagaagaggttatttgatattttttatgtttttgtgggaagtttttggtgagttttaaaagggaagggtatgattatgacgttggattttttttgttagtgatgtatgagtatttgtggtgaacgagatggaaatggtgaagaagtttatgattttatttgttgattgttataggataatttgagggaaagttatattattatgtattgattattttgttttagtaaagtagtatttttgggtgtattattttaattaattattatttttgttaattgttgaatgtttagtttttagtatttaatagatatttgtaaaattaataaatatataagtaggttattaagaattagtaattttaagagattattaagaattagtgattttaaagagtgattttaagaaattgtagtgatttaagagataattatgaggattaaaatttcgttttgtttaaatttaaagtttaggaattaaaattattagtttatttgagattagtagggtatttaaagtaaaattttaatattttttttataaaaagttatattttattttattagagttttttggggtttagttagtgaatatagttatatagtagaatgggaataaaaatacggtatttatggttatgaggttagaattttggtatttaattcgtattttggttaagtaatttttttttttgagtgtttgtttttttattattaaaattaaagggttgaattgtataattttttaggttaatatttaatttatttttggattatgataaatattaaaaaatattttatttttattttattgttattagttattttagtaattgaaaatatagtttattttgtaaattaaaaataaaatttaagttttttaattaattaaatgggtttttttgtttggttaaggatattttaaagtaattttgaaatattagtttaggttataatgggaaggggaggttggatttgtattattatatttttttttttttagaatcgaggtatatttgatttttattaatattagaataaagattttaagattgattagattttttgtagtaataagatattaacgtgatagatagtatgttttgaaagaaattaaagtattttattataaaatatatttatttgatatattttgaaatggttttgtaaagttgttttttgtggggaaaatttatattttgtagaaaatttttttttttttttaggttttttttttgatttaggagagaattatttaagtatttggtatttttttttttttttttttttttttttttttttttttttgcgatagagttttattttgttatttaggttggagtgtagtggtttaatttcggtttattgtaatttttgttgttttttgtgttttaaataatttttttgttttagtttttttagtagttggaattataggcgtttaatattatgttcggttaattttgtatttttagtagagatggggttttattttgttggttaggttggttttgaatttttgattttaggtgatttattgtttcggttttttaaagtgttgggattataggcgtaagttattacgtttggttaatttggtatttttttaagtttgataagaaatatttataatttagtttgtttgaagtttgttatttggaggttttatttgtatggtaaataataattttagtttttataattttttattttaatttagatatttttttttattgaatttatatttttagataaatttttaaataattgttaattagaaaatttttgaatttatttgtgatttggaagtttttattttaagttgttttttttttggattaaattaatgtatattttatatgtattgattgatgttttatgtttttttaaaatgtataaaattaagttgtagtttaattattttgggtatatgtttttaggattttttagaattgtgttagaggttattggttatttatatttggtttaaaataaatttttttaaatattttatagagtttgattttttttgttaataatttaatgcgggggttaaggatattaatgtttaatatagttaaaaatttttatataatttttgattttttaaagattattaatagtttattgttgattagaggttttattaataatataaatagtttagttatatatatttgtatgttatatttattatatattatatttttataataaaatgagttagtaaaaaggaaatattaagaaaataataaataaaataaaataaatttatagtattgtattgtgtttatcgatattgtaagtttatatgagttggtttataagataaattatgtgtttaaaattgtgaagaatcgtagttgtagattttattttatggtatatattaaagaatttaatttttttttgtaatgttaggatttttttttgttttttgggagtattttagtattattagtggtattttgtatagattttatgatgttatttaaggtttataatataacgttaaatatgaaaaatatacgagaattataagagattattttttattgtaatatataatttatgatgattagtattaggaggtattttatgtatatatttgtagtattcggatttattatagtagtaatagaaggtggttatgaagttattatagtaatgttttatgtattatagttatttaatgtagttgtgatttaatattgtatttttatgtttgtttatatgtttttttattgtgaatggtattatgtatggtttgtaagtgtataattttttataagttttaattttttataatagatttgtgtatattttatggtagtaaattataaaaatatattagtatttatatatgttttatgagtttatgatatatttaattttaagaaagtttttaatatttttaggttatatgatttatttgtgggttttttttgtaaattgttatatatttttaaaaaattttaaatatatttatttttaaaaattaatttataagaggatttatgtaatttaaatttgtgttgtttaaaagtgagttgtaattataaaaaggagaaaataattatttgaaattgattttaataaaaataaagataaaatattttaattattttaaagaaaaataattttttaatatgattaaataatgttaattaataaaaatagttttttgtggatttttttttaagtattttttagaggtaagataagaatattatttgttgaaattattttgggagtaattatgtttagtgaaatttaattagttagtatattgatagtattatttgtatttaatatagaattatggaatgggatttttattttttgattaagaaatataagttttataaattaggtaagaaatattgtagtttagttttttattattatatatttatgaattttttaatttattttttgaaaaattggttatatagttataattatttgttatttttttggtaattttatgtggatattttgttgaaagtttggtatggttttcgtgtttttagtgtataattttttaatattttgtgtttgttaatttttaagtaagggtgaaaaagttgaaattttttgttttttgtatgaagtagtagttggaaaagtgtgttatattttatgtaggaagttatagatttaagtagggtttattgagatgttttatagatttttttagaatatagaaatttttgttaagggagaagaggaataattaagtgatttgttatttttattgttggaaaaaaatattagtatttatgtaaaagaggtttattttatgagttaagttttggtttaaaaggaaatttttatatatatgtaatgtaagtagggattggttaatattttttcgggtgaatttttaagtataagagaatattttaattgtaatattgttttattggtgttaatatttagttattttttagcggggttattggttgttggagtaggtatagatttttaaaatttaagtgaagaaaaagtatagtgagttatatttttttttatttaaaaaaataaaaattaatatattattttttttataatattagtaatatttgtttaataaggaaagattagaagtttataaaattaatagagataaattaatttgttatttttttattgtgagataattattatgggatttattttttaatgtaattgatttttaaaaaattaaagtttttgaaaagttttttaaggataaatagtaataatgagatatttgtttaagaaaatttttgaaaattggtaagaaaagtaagagtttgtggtatttgaattaagattatatttttttttttttttgtatgttagtttagtgaggttagtaaggtatagattttattttagattgttatagtttagagtataggtttttttttttttatagttttatattagagcgttttatttttaggaagggtaggaatttagaattttttattttgtttttagttatttgttgttgagattatgttcgagataagtgtagttgagaagtgagaggatcgtttttttgtttaatttttatttgtggaatggagagtttgttttgggtgtggtatgttaagattattggggttttaataattttttatttggtttatgagggaatggttttattgtaggagaggtaaattaataggatagtaggttgttggttatattttttatttagtgtttagtttttagaattgaggagttatttcgagagaagtttgttatagttatatttagttttagagttttgatttagagagtttgtttgggaggaaaggtaatatattaggaatatattttaggaatatagaatatattttatatttattttatataaaatggaatagatattttaatgtatttttaaaggaagtaattttatgtggaatagagtatggagaagtttaaatttaagggtatttttaattatagtagagttgtggtgaaaagtagttgggagatttgtgtatttaatgtaggtatagtttagattgtaggttggttagtttatagaagagaattagagaataaaataggtgggaagagtttttttaaagtaaaataaatattaaatattgattttagaaattattttatagaaggatttattattttattcgattattttgtagaggaattttgttttagggtattattgaaaagagtggtaattaatggattttagtggttgggtaggtgagggaaagaatgaaaaagagttttataggattattgttattttagggtaattttggatatatttaaagttgggtttttttgaggtaatattaaaagtttaatattgtgggatgaggagatgaagatagattttattaaaataatttagataattattgttaattatataaataaataagtaaataagaataataagtaaaatgtgggggtagtatttagagtttttataatatagtttttaaaatgtttattttttaataaaaattatgagttacgtaaagaaataaaaaagtgtgattaatatattagaaaaatagaaggtagaagaaattgtttgagagaataaatttaatataaaaatatttaaagtagttattatatatatgtttaaatatatttagtatttttattaggattttttagagaaatagagataaaaagatatgtatgatgattgattcgtttaattatggatgttaagaagtgttataatatgttatttgtaagtaggagatttaggaaagtaggtggtgtaatttagtgagagttagaagggttgaggattaagggagttaatggtataatttttagtttgaggttaaaggtttgagaattaggatatgggttgtagttatggtaggaggaggggaagaaggagttttggtgtttaggggtagaagtagatgttttagtttaaagagaaagagaatttattttttttttatttttttgttttatttgggtttttaatggattgaatgatgtttatttatattagtgagggatattttttttatttagttttttgatttaaatattaaaatattttggaaatatttttatagttatatttagaaataatgttttattagttatttgggtattttttagttaatttaagttgatatataatattatttattatatttatagatttaaaggaaaggatggttaaagaagtgaaggaaggtgtgatggtaatgttttattagagagaataataataagaggaggtgtagttgggttttttgggtcgagtaggggtttagaaagttgtgaaatttatttattttttgtattaggatttattttagttttggatgaataatattgaagttatatatttataatatttttaatattcggatttgtatatgtgtttttttttttaagaaagttataaatagcgaaaattttgttgtaagtttttttgtgttttttttttttttttttttttttttttttttaaaattaaagatgaaaggaatgttaattgttcgtttttttgtgattagtaaattttatttaattttttaattttagttttttgtgaatatattttataaagttttggtaagattttgttttttttgttatgtttttataaggttataaagtaaataaaatttaggttgtaatttcggttttttttaagatttaagatatggaataaaataatttattgtttttgttttttattttggtaatatttttttatcgtatgtatttttttttttaaagagtttaaaaggtaattatttaaaattagtagtggttattcgttcgagattttttttatattgtggaagttttgtatttttattttgtttaataaagtttatagttttttttttttattggttcgtgtttttattattcgcggtaggtagtcgttatattaattttttggcgtggttaaggtaagaatttttggtattataataatagcgatagtagttgttttagtttatttagttgttataataaaatgttttagattaggtaatttataaataatagaaatgtattttttttagttttggaggttaggaaatttaagatcgaagaataaatagatttagtgtttggtaagggtttattgtttgttttttagatagtgttttttatttgtgtttttttttttttttttttttattattatattttaagttttagggtacgtatgtataatgtgtaggttagttatatatgtatatatatgtcgtgttggtgtgttgtatttagtaattcgttatttaatattaggtatatttttaaatgttatttttttttttttattttattttataatagttttttgtgtgtgatgtttttttttttgtgtttatgtgtttttattgtttaatttttatttatgagtgataatatgcggtgtttggttttttgtgtttgcgatagtttgttgagaatgatggtttttagttttatttatgtttttataaagggtatgaatttattatttttttgtttttatatagtggaagtggtgaataagtttttttatttttttttataagagtattaattttattaatgaggattttatttttataatttaattattttttaaagattttattttttaatattatatattagaaaatgggaattgagttttaaaatataaatttgggggtaggggatataaatatttagataatagtataataaaaaggaattaaatagaaattatggagttgaaaagtataataattgaaataaaaatttattagagaggtttaattataggtttgatttagtagaagaaagaaatgtagaataaagtttaaattatattttaaaaaaagattttggtaggtttatgttatgttttttttttattatttttgttttttaaaatttaaagatatttttaaagtatatttaattgtaatattttttttgaaagtacgtattattttttaaatgtatattattttttttttaagaaattatttattatttagtattataaataggtgttttttttgtgttttattagattataagttttttaagtttaagtttgttttttataagtttgtattttttattatgtttagaaaatggttttgatttaaaaaatattttttgtgtttttaaataaattgagttgaatttaatatagaggggcgtttttttataattttatattgattttatattttttagtgtttttatattatatttatttttaatatatttatttgtttttggtttcgtttttttttagttttaagttataattaataaatgaattatataaaaataataattggttaggcgtggtggtttataattgtaattttagtattttggaaggtcgaggtgggtggattataatgttaggagattgagattattttggttaatatagtgaaattttgtttttattaaatatataaaaaattagttaggcgtggtggcgggcgtttgtagttttagttattcgggaggttgaggtaggataatggtatgaatttgggaggtggagtttgtagtgagtcgagatcgcgttattgtattttagtttgggtgatagagtaagattttattttaaaaaataaataaacgaataaataaaaataattattgttttttatattattttatttttatgtgtgtttttttaggtataaatttttagagattaatttaaatataaggaattgtatttggaaatttagaagttggaattttttaatgatagagattgttttttaatttttgtttggttaagattagtattgtttttagttaagatgtaaatgtatattttttcgttcgtttgtcgataagtttaattatatgtagataagttaatttattacgtaatataaatggttgtaaaagaagggtattagggttttggaattaggtagaatttagtttaaattttattttgttatattttggatgtttgattttgggtaattttaatggtttttttgaattttaatattttaatttatataatatgttaagtaagttttatatgaataaataattgaataatattaaaattaaagttaggtatattatttataaatttaataagttatagagatttgttatattagggttttatattgaattaaatgaaattgattaaaattttttttgattaaaaatagatgattgttggtaattttaggtagtttaatgtaatttaatattttattaaaagatattagagattgggtatggtggtttatgtttgtaattttagtatttcgggaggttaaggcggtggattatttgaggttaggagtttaagattagtttggttaatatagtgagattttgtttttattaaaattataaaaattagttgggtatgatggtgtgagtttgtaattttagttatttaggtgagtgagatataagatttgttggaatttgggagttggaggttgtagtgagtttagatcgtgttattgtattttagtttttaggtagtgtgagattttgttaaaaaaaaaaaaaaaagatattagagatatttatgtaaatggaaagatatgttatatttataaataaaatatttaaaatataaatataatttttttttgagttaatttatagaattaatgtagttttatttaaaattttaatataatattgtggaattattatgttgattgtaaataattatagaagagtaattgtttaagattagtttataagttagttatatatgtaaataaatagtttggtttttttattagttatatatagaaagaaataggttggtaagattttgtttagttagtttttaatttattattagatttaagtataaataggagagttgtattgatgtatggatagatttatagataaacgaatagaaatagtaggtttagaattaatttatttatatgtaaaattatatttatgttggagttggtattggaattcgtttatgaaatagtgtagtaagttattttgagagaatttgttatttagacggaaaatttagtgttggatttatataatatagtatttataaaaattaatttaatttaggttaattaaatgtgaataggaattatagtgaattattattttattttagttggaatgtttattattaaaaaggtaaaaaaaaaaaaattgttggtaaggaggagggtaaaagggaatttttatatattattagtagaaatgtaaattagtatagttattatggaaaattgtatggaggttttttaaaaaattaaaaatagagttgttatattatttagtaattttattattgattatttagttaaaggaaaggtaatttttaaatttttaaaatagaaaatttagaagattattttatgaattgaagtagggaagtattttttaatagggatgaaatagtaaaaaaaatttttaatttttaataaatatattttaatatatatttttaaaaatttaattaaaatatattttaaaaatatgatataaattggaaaaagttatttttaatatatataatataggaaaattaagttgtaaaaattaaaatttaagttttataagtttatatttatttatatatatgatatttttatatttataaaaataataagaaatttagtgttattttagggatgagagttagtttatgaaaaggaagtatagtaggttaatatataatgtgaaaagatttttacgtttattagtaattagataaatatattttaaattattacgaagtattatttaatttttaagagatgggtaaaatgaagtttgataataatttattggtaagaaaatttattagtgtgaataattaaatatttttagtgggggttgaaatttatatagttagttatagtaaagttgtaaatataaatatagtgtatagaatttttagttttaggtatttgttttaaagaaatattaggtatttggataaggaagtatgtatagggatgttaatagaggtgtaggttataatagtaaatagaaagaaaagaaataattagaattttattatggaaaaggtttttagaagtaaaatttttgtatttttggttatggatttatagaggtttaatgtgaagggggtatttagattaaatgtttaaagtggagtaagatattattgttttttatagaattattttatagattgtagtagattttttttgattaatttttcgaaattagttaaattttttattttttttaaagtgaggatttttatattaagaagtttttagtattgagataattagcgataaatttatttattgtaagggtggttttgatgtagggttagtaagttttaaaattggggttttattcgagagtgtttttggttttattcgggaaagattttaaggatgagatagtggtgttagatagtaatttttatggaattaagttattttttgaagagtagggttattttataggtagtgtgtttagaatagtagtttagaggtagttttgtagttatatttatatttatttttaattatatgtaaattaagaggtggattatgtagaagtttttagaaatagggtagaaatttttgtataatttattttttaatttatagatggtaattttaattattattttaatgattttagtgggttattattgttatggaaagaagtggtaatttttgggtgttgttatggtaatggtaaattgatatggtatattggtaggtatgttttatggagaggtgtttttgttttatttttgttttagttaatttttaatttgatttgatgtttgagttttatttattattttagttttatgatttttagattttttagttgataagaagatgtatgagtaaaggaggtaattgagagatgtttttttttagtgtttaagtgttaaaaagaatttttagttttaattaaaatttagatataagaaatttattgaaagaaagtgattatagaatttataagttgatttggtgatgttttagtaagagtgagaaatatataataaattataagatagaaaatttataagagttaaaaatgagtattttgtggtattaattttgttgtaaaaattttaatattttgtgtattttttttagtattagattagaatttatatgttaatgggtagtgatatatatttgttattggtaaagttgtatattaatttataattttatttttatatttaagttattattatatattgtttttgagttagtagttgtatttgttattttggtttaaaatattagttattatatttagtaaattttattatataaagtaaattagtattgatttattagatttattaatgggtggggtgaggaggaggagggcgttggttgatttagtttaggttttgaagagttttgttttagagaatatgtttgtgtttttttttatggtttagtatatgtatagggttttagttatttgtttttagtaggaggtttttttatatttatttatagttagttggattttaatttttgtttaagtgtgagtaatgtagatttaggtttttggttaatgtagttattattgtttaagtttagttttttttagatgttgagatagtggttttaattttgtgtggttggtttagagttgtgtatttatttttatttttatattatattaattttagatttttattgttacgggttttttaattatttttttttttttaggggaaatttttataatgtagtttttaatatgttgaatttatattttagaaagtgttttgtagaataatgttttattgaaaacggttattatagttaggagtttttaattatgtttttcgatatttttagttatagtttgttgttatgttttttatattttgtgtgaagattgtttaagtgttggttaaaggatatgttattatttaaaatttatattgagaattttagagtaattaataataagtgtgatgtttgtaggaaaagaagagttatttggttataggatgtggttattagaatagggttgtggttgaaggggaaggatgatgatataaatttttgtataaattatattaatatgaaattttgatattattattatatatttttttttttatttaataaggtaaagtagagaagttagtattatttgtttttggtagattaaattgttaagaaggtatatttaaggttggtggtagggggagttttattagtattaggaataatagaaaatattaaagaataagttttgtaagaaatatatagatttaatagaaagtaaaaaatgtattttattgaaaagaaaataaattataaatgaattatgaagttggatggagatataatttatagatttaaaattatttttatttaaaataatgagattttaaaaaataataaatgttttgaaagtttaggataagtatattgttttgtattgttgattttttaaagagtagtagagtgtattatatagtatattatataaaggtatgggtttgagttaggtagtttttttgtttgttgaggtaaaatttatataataaaattaatttattttaaggtgtataatttagtagtatttagtgtatttatttatgttgtataattattatttttatgtagttttataatatttttattatttttaaaggagattttgtatttattaagtagttattttttatttttattttttttttagtaattataatttggttttagataggttttgttttgtatttagggtggtgatttttatattaatttatgtagaaggagtttaggtttagaattttgtatggtgggtagggattgtggtttgttttgaagttagatgtgtttgtatagtaaatgttttatttttatttatgtgtgtttgggttatttaaaaaagaatgttttataaatattatggttatattgttaatttttaaagtgtttttgttgttttatttatggagaaaagattaatattaatttgatttgttttataaagggattatattttttaatgtttgtgaaaataataattaaaattttgtttggttgtgttttgtgtatatatttaaagttgttttgaatttttaatttatttgttttaagtttttttttttgtttatttttattgcgtttttaaaatgttttttgtttttttatattattttatatgtaagagcgattaaaaaatggttatgagtttgaagaaattagatggaatttggggttaatgttttagggtttgatttttttattgggggattatgaaggttatagcgtggaattattttttttgggtttatttaattttttttgagaggaaattttatgtattttgtttgagggatagatgttagttatttatgtggtagaggttagagtggaagagaggtggggttagttgttttgtatataattttttaattaatttttttaagtgtttttaagtttttttttaaaaatgtttaaataaatatttttttaagtatatggtgaagtttttatagttattaaaaataagattttatgaaattgtttagtgatgtagaaaattgtttaatttgtgggaaattatttatagattaagtaaaaaataaaaaattataaagattaatattataattttgtaaatgtatttatattgtgatatttatatttataaaaataggaaggattttaatgatatttagaagattatgattagatgatagaagaattattatatttttttttttttaatagttttaatagggtttgtaggtttaaggtgagtggttttgaaaaatttttgtttagggaaatttgtatggaatattttaatgtggatattgtgtagaattttgtttatattgtttttgtagtgttttttttttttttttgtaggtttttatggttttttgggattatagttataaggtttttgtttttagttgagtttttaggtttattttttaatttttttatataattttatttatttttattttttttttttttttaaagggtttttttttatttattgtttttatggaagtaaaataatgattttattatattttataaataaatagaagaagaaagatgtgaattttttttaaatttgatgttttaaatttgaaatttatgaattttgtggtatttaggtgagtagagatagaagagtattacgtaggtttatatttttttttttgaagaaggaaaaatttagaaaaaaattttagtttgtagttttagagtaacgtttttgtgggatttttttagattggaaatttgtggttttttttttttggggttgggagtaagttttgaatttttagtgttatgtagtttggtttaagtttaggaatatttttttacgttttgatgaagttgtaaagttttattagttataatatgtttgaatttgtaagatttttaagtaagtttgataataaaattttagattttttagttgatcggaagattttaaagtgtttttattttttaaattatttgtagatgaattatattggatttgattaaaagtgtttatttgtgtataaattaaatatagttaattttttttatttaaggttttatatttgtggatttaatttattatggatttaaatttgtggatatgggttattatagtattttatagaagaggttgagtatttatagattttgatattagttgggtttttggaattaattttttgggggtatagagttatagttaagtatgagaaataaagagaagaggaagggtttatttttgtttataagttatttatagaggagggtttaattagttgtattaatgtagatttttattttagggttggttttggagaaatatttttagatgaagataattggatgtgtaagtggttagatttatatgtaattatttttttagaataataaagttgtggtttgataaatggttttttgtttgtgataggagtcgtggtataaatttttttttgggttatagtgtagtataattgttttttttttagtgtgttattttgaagttagattgtttgggtttgaattttggttttattttttattagtggtgtagttttagttaagtatttaatttatttcgatttttttttgattttttttgtatggtgtatatttttattttttttatttttaatgaaggtatgtttttatatttaaaatgggttgttgatagtttatagtttaatattttatttttatttaatttgtttttttttattttttaattggtaaaatgggggagggagatataataatatatttatttaatagtattattttaaaaattaagttagttaatataagtatggtaaaagtaattagaagaatatttggtatgtggtaagtatttaatatatattaggtattattattttattattaattattattattattattatgattgggaggtaatatggtaattagtttttatttttttattagtttggttgatgaatatttagtatatttgaagagaaagttttagaattaaaaataaaaagaggtttggttttttttatattgggtggaaataaggaggagggaaggaatatgagaggaataggtaatttgtttttttagttttattttaattatttttaggaaattaatttatttttatatatttggggaaataatcgggtttatttttttattttaattttgatttttttttaaaatttatatattttaggatttttggtagattttaaattgtaaatattaggtttatattagtaagttaaattcgtagttgatttggaggtttattgttaatttagtgaatagtgtttagattataagatttaattggtatattttgaaatttattggagattgtatagattaaagaaatgaagtattttttatttttttataagtgtaaatatattaagatgttgttattttttttttgtagatttgtgggtatgagtcgtttttgggttaagttatttgatagtgatttaaagtataaagtatagggtaatgtttgtttttttttttttttttttttttttttttgtaatagagttttatttttgttgtttagtttggagtgtagtggtatgatttcggtttattgtaatttttattttttaggtttaagcgatatttttgttttagttttttaagtagttgggattataggtatgtgttattatatttagtttattttgtatttttagtagagatggggttttattatgttggttaggttggttttgaatttttgattttaggtgatttatttattttggttttttaaagtgttgggattataggtattagttattatgtttagtttatttgttttttaatttgattgttgaattttttatttttttggttagttaattttttagatagagagcgttgaaaggatatttatgtattatgtgttatttataattttttattttaatttttaatttttataattttatttttttttagttaggttttggtgataatttgtttttgtagaagttgggtttaagtgaaattaaaataagatattaaatatttttttttttagtaaattagaattttgtgggaagtagtattatttgtttttggtagattaagttatgaagattataagaaaaaatatttagtgatggaggaaggaaaaaagtatttattaataagagtaaaataatataaaaagtatttaataaggaatataaagaattattagagaaagtgttataaaatttttttgagataagagaagatgaataagtggagaagaatatggtgtttatagagagaaatatagtagatagaattaatatagttttaaattatgtatttttttgttgttgggtggagtgttttgtaaatgtaatttatagtttagttaagttatttgttagtattgtttagttattttatatttttattgattttttgtttaatttttttatgaatattaagaaatgagtataaaatttttaatgataattttggatttttttatttttttttttttttatgttaattttgttttttgtattttgaagttttgttgttaggtgtatatgtatttaagattgttatgtttttttagagaaataattttttattattaagtgatgtttgtttttatttttattagtatttcgggttttaatttttattttgtttagtattgatataattattttgatttttttttgattttttttgtatagtatatattttttttttttttatttttaatgaaggtatgtcgttatatttaaaatgggttgttgatatgttatagtttaatattttatttttatttaatttgtttttttttattatttaattggtttgtttggattaattatatttaatatttttattaatatgttgaattatttttgttagatatttttattaattcgatgaaatatttatttttaaaattatttttttgtttttttttggattagttgttgttttagaattttatatatatgtataatttatttttaaatttattttagattagtatattttagattttttttatttattgtgtaattgttgttatataattttttttttatattttgtaaatatataatatattgttattatttttattttagatagtttgttattttataaagtaatgatttttaaatgggagtaattttttttttaagtggtatttgataatgtttggagatagtttttgttgttattaatggggaggttgttatcggtatgtattggatagaggttaggggtgttgttaaaagttttgtaatatatatgatagttttttataaaaaaataattattatttggtttaaaatattaatagtttttaggttgagaaattttattttagagatttttaaatttttattttaagtttaagggtatatgtttaggtttgttataaaggtaaatatgtgttataggggtttgttttatagattattttattatttaggtattaagtttagtaattaatagtaattttttttgattttttttttttttttattttttattttttaataggttttagtgtgtgtggtttttttttatgtgtttatgtatgtattattataattttgtttttatttataagtgagaatatgtagtatttggttttttgtttttgtattagtttgttaaggataatggtttttagttttatttacgtttttgtaaagaatatgattttattatttttttttttttttttttgagatagagtttggttttgtcgtttaggttggagagtagtggtataatttttgttttttgtaagtttcgtttttagggtttacgttatttttttgttttagttttttaagtagttattatatttagttaattttttgtatttttagtagagacggggttttattgtgttagttaggatggttttaattttttgattttatgatttgtttattttggtttttcgaagtgttgggattataggcgtgagttattgcgttcggtttaattttatttttttttatggttgtatagtattttatggtgtatattattaaattgtttttatttagtttattattgatgggtatttaggttgattttatgtttttgttattgtgaatagtgttgtaatgagtatacgtgtatacgtgtttttataatagaacgatttatatttttttgggtatataattagtaattggattgttgggttaaatggtatgtttgtttttgggttttgaggtattgttatattgttttttataatagttgaattaatttatatttttgttaatagtgtataaacgtttttttttttttataattttttagtatttgttagtttttgattttttaataatagttattttgattggtgtgagatggtattttattgtggttttgatttgtatttttttaatgattagtgatgttgagttgttttttatatgattgttggttatatgtatgtttttttttgagaagtgtttatttatgttttttgtttatttttttatggagttgtttattttttttttgtatatttaagttttttatagatgttggatattagatttttgttggatgtatagtttataaaattttttttttattttgtatgttgtttgtttattttgttgatagttttttttgttgtgttttttagtttaattagattttatttgttaatttttgtttttgttgtaattatttttagtattttttttatgaaatttttgtttatgtttatgttttgagtagtattgtttaggttgttttttagggtttttatagttttgggttttatatttaagtttttaatttattttaagttaatttttgtatatggtgtaaggaagggttgtagttttaattttttgtatatggttagttagtttttttagtattatttattgaataggaaattttttttttattgtttgtttttgttaggtttgttgaagattagatagttgtaggtatgaggttttatttttggttgtttattttgttttattggtttatgtgtttgtttttgtattagtattacgttgttttggttattgtagttttgtagtatattttgaagtcgggtagtgtgatgtttttagttttgttttttttggttaggattgttttggttatttaggttttttttagttttgtgaagaattttaatggtagtttttaataggaatagtattgaatatataaattgttttgggtagtatttgtttttaaagtttttattaaaaattatttgttattagtttaataattaaggttaaggaaaggtatttgtatagttaggtggggtggtgtgtttttgtagttttagttatttggaagattgaggtggggtttgggagtttgaggttagtttgagtaatacggtgagattatatttttaaaaataaataagtaaataaaaagatttatataaagaatgtttataatatgtatattaggattggagagtttttgggaagagaattaattattattggatatgaggaatattagtttttagatagttagttttgtaaattgatttagatgattaagaattttagtttaagttaataagtagttattgattatatattatagtatttgtaaagtttttatgaaataatttatttggtttagttgtagaatatttaggagttatggagaaggtagatttggatatggaggtaattttgtatgttttttagtagaagattattataaagtaatttttttttattttattattattattttaagacgaagtttcgttttgttgtttaggttggagtgtagtggcgcgatttcggtttattgtaagttttgttttttgggtttatgttatttttttgttttagttttttgagtagttgggattataggtgtttgttattatgtttggttaattttgtttttatatttttggtagagatggggttttatcgtgttagttaggatggtttcgattttttgatttcgtgatttgtttattttggttttttaaagtgttgggattataggtgtgagttattgcgttcggttttttattattttttattgtgtagtttatttaagtgagttatttaaaataattagtttatatatataggagttgttgttgataaagaattggtggaaatgatattaaataataaataattgtttttataagttttttttgttttattaattttatgattgtgagagattacgtgattggatattagtatataggattttgtattagaatatgagtttggtagttataagagattatttataattttttataattttgtatttttatttgtaaaattttataaagttttttataagaataaattgtagtattttatttatattggaatttaatagtttttagtttaagttttttttgagaaagttttattgtgtttttagtgtagattagtaaagataagattttgattggtaggtgagtgtgtggaatttattttaaatatgggggttttttaatattcgtatattaaatttatttatatattgttaaaagttagaggatatttatgataagttgtaaaaatagttataaattttttgtagtttattttgttaagaaatgtaatttattaatttattttttgatgtgagttagtattatgatttgttttgaataatagaatgtaatggaagtgatgtcgtgagttttaagtttagtttaagatatttgttgtttttattttgtataggagagttttttagtatttgtgataagttttagtttttttgttggataatgagtttatatgaatggagataggttttttatatttgttaaatttattgatgttatagagatgtgagggggtttatttgagaaaagttgaatttgtttagtatataaagattatttaggtgggttaagtataatttgttgttttatagaattataaggagatattaaattattatttgaagttattaaattttggaatattttgttatatagaaaatttgatagataaaatagtttttaaaaaaattgtgttttttagtaatgttttagtgtttttgtggtttataggtttttatatgtttggagtgttacggggagaaggttaaatgaatgaggaaaaattgataggtttttttagtttaaagtatgatgttattattattattattattaatatttgtttttatgtagtagttattatttgggaatagatgttgtatgttagatattagattgtatttaattttataattgtatttatttattattttattttattatattaattattatttaataattttttttttgttttatagaaaataattttaagatttaggtattttgagtgatttgtttaaggtgttgtagttgataaaattaaaagtagtatggaatatatatttattttattataaaatttatattttttttattgtgttattttagattttgttattgttgtgaagtatttttaattattgtaagatagaagttttggtttttagagtaaaattttattagtgtataaagttagattaaaataatttgaaaatatatagagttttagagaacgttataattgtttattagaattaatataaattttatttaattttttagagggtttttaatgatgtgaattataatggtatattttattgttattttagttatggaattaatggtatgttaataagtgttttttgagaaaattgttggataaagtattattttgaattttaaattttatttttattattaatttatgaagagaattttttttttttttattagataaaggtaataaattagtttttgttaaaatggtatattgtttttttgagttttatttatttattattttattttatattaaaattatgatttgaagatagaaggaattggaataatgtttattgtgttatggtcggatgaagtaggaagaggagaagagataaaattaggttaaaggtagaaatgttatttgttgggttaggcgtggttttacgtttgtaattttagtattttgggaggtcgaggcgggcggattatgtggttaggaggtcgagattattttggttaatacggtgaaattttgtttttattaaaaatataaaaaattagttaggcgtggtggtaggtgtttgtagttttagttatttgtagtgagtcgagatcgcgttattgttttttagtttgggcgatagagtaagattttgttttaaaaaaaaaaaaagaaaagaaaagaagtgtatttataatttttttaatgattttgttttggattttttttttattttataggatgtgagatttgaaattgtatttttaattttttatttaagatgtaattttaattttatatttaatattttaattttttaattggagttgagttatttaaattgtaattttaataggtgaaattttggattattattttaaaatattttgtttatttgttaaagttttaaggaatttttattagatataaagtaggtaagtttggatataggaaaaaaaataaaaatatgttatttgttatatagtaaaaaggatattgagtggtaaagggagtatattttaaatgggattttaaaaattttttttatttataatggtaggagttagaaagaataaagttatttatagggttaaatattttttttaattatgttaaggtattggattttgaattcgtatagaaggagatttttatttattattttttataaggatttatggtttgttttatagtattatatttgtgttgtttattagttgtgtgattttgggaaaagttttttaattttttgggatttaatgttttttttggaaaatgagaatgatattaaaatatgataagtatatgtaaagagtttaggaattttttattttaagtatagtatatgtatattttttataattgtttaatgaggtattttaatgtttttagttaaagattagtaggagtatttaagtaatgaataagttgattttattatttattgtaatgatggataaaatttattatgagaattatgtagtaagagattgttggaatcgaataagtagaattaggagaatatatatattaagagaatgatgtaacgaattaatttttgtatttgtaggggtgggttaggtaaattagagatttattgggtggtagttgttaggaagggtaggttggaatttttagtataggttgatacgttgtttagagtggaatttttttttttttagagaaattttagttttgtttttaaggttttttaatagtttagattaagtttatttagtttttttaggataaatttttaaagttaattgattatgaattttaatgatatttataaaatatttttatagtaatatttagattattagtgtttgatttgataattggggattatagtttagttgatatataaaattgattataaattaattgtaaggtttgtgtttgttttaggtgattttggggaggatttaagaatgagagattttgtttttagttggattttgatagaaagtggagggttggggtggtaatgttatgattgggtagttttataaattttatttagagggatagaagattattttgaggttatagatgtgatggtaaagaagtagtaattattttcgagagagatatatttggttatttttgtggtttggataatatttatgttttgtttgggtttagatatgatgattgagtattttggtattttgttttaatttattgtgtttatagaatttattgtgtttatagagtatttgtttgattttgatgttttgtgaaattttttatttttaataggagaattaaaattatttgggagtgttagtttagtttttagtaattttaaggttttgttaattgtaattaggtagtttttaggggttaggatattttttttgttttattttttttttttttttatagtttttgttagtgggaggtaaaatagtgttgagaattttagaaggttatttattaaggatagagtgattttaaatagattttttattaatttacggtttttattatatatagaaagtagatgtatttgaaaaaaataataagttttgttttaatgattaattttagtttaatttttagttttttgtaaatatttggaattttagtgtggtaggataataaattttaaaagatttggtagtttaagaaaagaaaattatttttttaagttagtgtaatttttattttatttttaatttttgatttgatatttttaattaaaaaaaaaaatttttagagtaattgagttagttaaattttaaatgtaattaatgtttttaaattttttttaaatatatgtaagaagtattaaaatatagaacgtaaagattatttaatgtaaagaaaaattgtataaaattttatatagttattgtagatagtattatttggtattataatttttttttattgtcgtggttaaaattatttggattttttgagagtttgagaataatttattaaattggatttatataagtagaaaaggtaaaggtgttgatcggttattattagtagagatttttaggtaggtggggttaatttaatatttggagaattttatatgtattatggaagtaaaaagaaaaagtaattaatttatatatagaagttagagaaaggggaggggatggggattgttagggagggaaatcgatttagggaaaaatttttggaggttgtaatttagaaaattttgaaggatgtcgtataattgatgatgttatttatttacgaggttgtttagaaatgtttatttttggttagggcggtggtttatgtttgtaatttgagtattttgggaggttgagatgggtagattacgaatttaggagttcgagattagtttggttaatatagtgaaattttgtttttattaaaaatataaaaattagtcgggcgtggtggtaggtgtttgtaattttagttatttgggagggtgagataggagaattatttgaattcgggagttaaagtttgtagtgagtcgagattatgttattgtattttagtttgggtgatagagtgagattatattttaaaaaaaaaaaaaaagaaagaaagaaaaaaagaaaagaaatgtttattttttttgttattggtagatatgtatatattagagaagatttcgatttcgtgttttttttttatttatagaatatttttttaagtttattttgagtggaggttgtattataataaggggattgttttgtttttttttagggtttttaatataaattttttaattagtaattgaggtgttattataggggatttttttaattagttaaaatttgatttggtagggtttggtttgggtgtttttagattgttttgtttcgaggtttttataattgttttataatttagaatagtaattgttaaggttgttttgggaagaggatgattttaaataaagttttgatgttgggggtttttgttttgattatcgtgatgagtttttgtggaggtgaagatattgtgggtgagtgtatgagtgagggatgttttttggagttggaagagaggaaattgaagtaaaagagagaaagcgatttgtagagaaattgtagagattttttaagggtttttttagtattaagagatttaaaaattatggttgttttttttttaggaaattagagttttaatttattttttttgttatttatgttgttggcgtttattaaggatgttattttgtttatattgtatttagtgattatagtttggaggtttttatgttattttattatgattgttttaaaaattagtgaggtttttattaatggataattttttattattaaaaatttgtgaagtattatttttaaatttttttgaataatttttgaagtttttcggatgttttttgtagtagcgtttggggtaaatgattttattaattatatattttatagatattaagaaagatgttttttttttttttttagatttattaatatttttacgtgggaattggtataggtggggagtgggtaaaggagtttagtaggttgaatgtttttaataattattttattatatggtttttatttatttttagttgttttatatgtgttattttataaataattaaataaaattggtatgtagttaagttttgtaaatagtgaaaatatgaatgttaattttatttttatatatttttattataggtatagttttatatttttttttttttgtaaaataaggtatttttttattttaaaattgagaatttatagtagaaaaatttggtaaattaaattattttatttttaaattattaatttaaattatttgttttttaatttatttaatgaagttttataaaaagaaaagtgggttagatatggtggtttatgtttgtaattttagtattttgggaggtcgaggtaggaggattttttgagtttaggagttgagattagtttgggtaatatagtaagattttatttttataaaaaataaaaattagttaggtgtggtggtgtatgtttgtggtgttagttatttagaaggttgtagtgggaggattgtttgagtttaggaggcggaagttgtagtgagttatgatggtattattatattttagttagggtaatagagagaaattttgttttaaaaagaaaaaggaaagaaagagagaaaggaaggaaagaaagaaagaaggaaggaaggaaggaaggaagaaggggaagggaagggaaggaagggaaggaaaggggaggaaagaaggaaggaaaaaagaaaaagaaagaaaaaagaaagaaaaagaaagaaagaaagaaaagagggaaggaaagaaagaaaaaggaaggaaggaagtatagattaattattaattatttggttttttttagttttttttgtttttgttatttatttatttttatttttttttatgtatttttttttttttttttttttttaggatttatttttgattttttgtttttttatatggatagtggggtttgtaaaataaaagttgaaaaattagatagttaaaaggtgaagtgaattggaaggtttaaatttttataattttattaattatggttgtttttattttgattttgttcgacggtggaagttttatttttttttttagagtatttggtttttttgttttaaattttttttttttaattttatattagagtgttttggttaggttcggtttatttattaggtataatatgggtaatgtagagaattttttatattgtaaagttatatgagaatgttttaattttttttaagattagaaaaaaatgaaattttagagtttaagaaaatgttttaatttagtttagattgtattgtttttatattaatttagttataaaatataattttttatatttttatggaggaaggggtttataaaagtaagagtgtttagggtttatatgttagaatgtagttttggttatggttgattttggtttttttatgattttgttagtgtgtttgtttattttttttaaaatttatgtcgtttttaaatatagtaattgtaatttaaaatacgtttgagtatatagtaagttaagttttaaggatttaaagatgaaaagttatgttgttttttttgtagagggtgtttagattagtgacggaaacggtatgggatgtaggaaagtagaaggttattgttgattagggtagtggatttagtagaggttgaaattatataaatgatttggttttagttgggttagtagggtgatattttttagtaaaattcggtatttaagataagttttagatgaaaagaaggattgttttgtgtttgataaggagttaaggtttattgtaaggataaggttttgttggtggtttgttaagataatttagggtagttatattggataaggaagaaggtgagttggaagaggaatagataaatagttagatattgaggtggaggagttggaggttataacgtggttaaaaatatgtcgatgagaggatttagttataaagttgttaatttaagtagaaattttaaggatgaattttaggatttttttaggaagttttaaaagataattttattttagggagaaaaataataaattattggaaagattagggaatatgaaaggataatgtagtttggtttgtttggtagatatttatgaaggatgttggattgtaaggttgttgatagtttttttatagaatatgttatagtatattgtatttgtttttttatttatttgatttttttattttttagtttgttttttaatggtagattatgtttgattggtgttttatatattttttgttatgtttgatatttgtggatgtttagaaagtggggaaggaaggaaagatataacggtaaaaggtttatacgttttgataggaatgtttagttcggtttatttggttggagttatattgtacggttgttattttgttttggtatttttagataagtatattgtttattagaggaaaaagggtttaatttatttgagtttttaagtgaatataagtgttaagttagaatattgtagatatttagtaattttttttagaggaaaaaaaaaggtggggggaaatgatagaaatttaaaaattagtagagtttttattttttattttagaagaaattagttgtttttttttaaggattattattattaataaaatagagattttgaaggaggtattgtttatttattatatattttgtaatgttattattatttttgttatatttttttttatattttataattgttagtagatattattttaaattaataagattttgtatgttttttttttttttaaaaaaagaaagatttttgtgtagagtgttttgttttgagttagttttgagaggaaagaaaatataattagtttgttattaattgatgaaagaattaagtgaaagatgaattttaggaagtagaaggaagtaaatttaatttttgattaagaaagttaaatattataataatttatttatttttttttttgtttaattatattatttaattataagttcgtgatgtgttaggtatttaggaaatagtaaaaattggatatgtgatattttgtttttgtgtagcgtatattatagtgggaaagaaagcgtaattttaatcggataattattaataataagagtggaggaagtaggggttggaaatgtttataggttgtgttaaagatgaagttcgtaatatttgaaagttagttttttttattattttgtgtattaaggttttttttttttttgttttttatttttttgtttgttatttttatttattagttgattacgtcgttttttatggtgtaaatttgtattagttttacggtttttttggttagtatatttatgaatttgatggagatgagtagttttacgtggatttggggaggaaggagattgtttggtgtttgtttgtttttagataatttagatttgattcgtaatttgtattgataaatatcgttgttttaaaatataatttgaatagtttgattaaacgttttaattttatcgttgttattaatggtatgtgttaataattttgtttttttttattgatttatttttttatattaagttttattattttatttttaagaggtttttagatttttttatggtaattgttgaaattttattattttttatttttaaaattatatatttttatgtaatataagggtttttttattatttatttattaaatttttttcggagaggttttattaattttttattttattaaatatgtttatagagagaagggtataggaataaagcgaaggtaatgtgtcgttgtttttaagtagaaggtaaataagatttttttgattattaggtggtgaaatgttggtaggagggtttttttaggatgtaatgtagaagtttatggtagagttatttatattttatattagtgttgtttttttattatagaggtttttgaggttatagtgttttttaagtttttcgtgatattgggttagtttaatatttttatttgttttgtggataatatttttttttttgtggttaatattatatggttgagtaatgggtatttagttatagaaggtgtttttgagattagttttttttttaagagtgattattttttttttaagattagttattttattttttttttttttgttgaggagagttatgattgtaaggtggagtattggggtttggataagttttttttgaaatattggggtaaggatgagttttattattttttgatgtttttttgtttgttaagtttagaattttttgttttttatttttatattttaaaatttgttttttatattttatgggttttttttttttttttgaaagaataaagtaataaaagtaaagatttattgaaaatgaaagtatattttatagggtgggaacgggtttgagtataggggtttaagagttattttatggttttttaatgatagattttatttttttttttaagttggggattttgagtttttgtagagttaattttttattttattttattttatatatatgtatatgagtatattttgttttttgattttaacgattttatatttatagagtttgagattttagtttttatgttagagtttatagagattgtggtttgcgttttgggattgtttgtgggtttcgtgggtattgtggtgggtattgtttttattattcgaggtttgcgtttagttggtgtttttagatattaagggtttttgtgaattttattttggaatggaaggtaagattgagatttgttagagttgaattcgtagtatgagaggaaggaaagtggaggaggttgtggatatgaatggttgaaagttgtaggggaattgggaagtggtatgatgatgatataggagcggtttaggatttatttattttatgtttgttttgttgtaggtgtatcgttatttataggagtagaagagtggatttgttatatgatttagtattattttttggttttatttattatatttttttttttttttaaatgtttttttttttattttttttgtgggatttaaattgttatatttgtttagagtttataaatgtttttgaattatttttttgattttttgatttttttttttttaagtgttatttattaagagttgtttggagtaagttatttagttatttaattttttagtaatttttatttataatttttatggaagtaataaattttttttatgagatatatgttaaatttttttattttttatttagggttgattgaaatcgtggttaagaattgggagatttttttgttttaagttaatttaatattatttattagattatttgttatgtttagtaatatagaagtaattaattatagtatagtttgataatatgattttttagttgatattaatattttttttttttttgtgtttttatttttggtattgttatttattttttaattaaggtaataatgaagttaatggatattttttgtttttggtttagaaatgttatagtaaaaattttaaaataaaaaagtaagtttgtattaattttaatatgatttttaaaagtatgatagagaaatgggttgggataaaggaaatttgaattttaaaaatattaatagtgaaaagttatttttaaaattttaaatttgtgaagaatgatgatagtagaagttttttttttttttttttattttgaaggaataaaatttttttaggtaggaaaagaaatggaagttagaaaaatattagaataagataataatgtgggtatttgaaaaggaataaatatttattttttatatagggttagtgataatggggaaagggatgggagtagaagttgtagatatatttaggagttttagaatagaggtatagtttgttttatttttttaatgaagttttgttagataattatgtagttttttttgtgttagtttggtatgaaggagatagtatagtggatatggttgtaagatgtttttaggaaatatgtcgataaaaaaataatattaatatttttagaaatttttagtttttttttttaatttttttggttaaggaaagtattagtttatgagaaaaattttaggaagaataatatagttaagataatgtagtagtagttgtgggtgttgtgttttttattggattcgttaatttttaggagaaatttttatagaggaaatgggttagtagtgattttatggttttaaatagttatgaaatttgtaaggatatttttatttatgttatttgtattagtgagtttaaattttaattgtagaaaaaagataaaatattaatgtagtaattgatatagtatagtttggtgtaaagaattttaaatttaaatttaggatttagtattttgaagttagtattttaaattttataagtgggtaaagtaattaatatttttggttttattttttttatttataatgtaggagtaataataatttttttgtagagttattgatggaatttgaataattttgatgtatagttaatgttttatatatagtatataaatatataagaaaatattgtggttatatttataattaatttatttaaaagaatggattacgttatatgaaaagtatttttgttttttttagttttttaatgatttaggagatttaaatgtagagttatgggtgaatttttttttatatgattattggaggatattttttttttttagaatgagagaggttgagatcgattgttaagagagtttttaggacgagaaattgtaatatttgattttggtttttaattttttaagaagggatatattttttttttatggttcgtaagtgtttatttaaggtattttatatgtaatagatgtttatgtatgtttattttgggaaggaggtgaagaaattttaaggagaaaataatttaaaatgtagattaggaattagtaagtatagggagtttgaattagtgatgattatgaaaatgtttattatagattatagaggatttttagggtaatgaaattattttatttgatattataatggtgaaaaatgttattatgtatttgtttaaatttatagaatgtataatattaagagtgagatttaatgtaaattatggattttgggtgataatgatgtgttaatgtaagtatataaattatagtaaatgtattattttggtgggagatgttgttaatgggggaggttatatatgtgtgggagttaagtgtatttggtagtagtttttaatttttttggtattagggattagttttatggaagataatttttttatagatagtggttggaatgtggatatgatttggggatgaaattgtgaaattgttttattttagattaaaaagtattagttaggtttttataaggaatatgtaatttagattttttgtatgtatagttaataataggattcgtatttttatgagaatttaatgttattattgatttgatagaaggcggggtttagttggtaatgttaattcgtttattgtgtggtttaatttttaataggttattagttggtattggtttatggtttagggggttggggttttttgggatatttttgtattttttgtttagtttttttgtgaattaataattgttttaaaataaagtttattgatagattggattaagaaaatgtggtatatatatattatggaatattatgtagttataaaaaatgatgagtttatgttttttgtagggatatggatgaagttagaaattattatttttagtaaattatggtaaggataaaaaattaaatatcgtatgtttttattcgtaggtgggaattgaataatgagaatatatggatataggaaggggaatattatatatcggggattgttgtggggttgggggaggggggagagatagtattaggagatatatttaatgttaaatgacgagttaatgggtgtagtatattaacgtggtatatatgtatatatgtaataaatttgtatattgtgtatatgtattttaaaatttaaagtataataataataaaataaaaaataaataaaaataaaaataaaaaggagaagaaaaggtaattaattatgattttaaatatataaaataaaatttttagtatgaaaaagttatatttaaatgtataaatgcgttaagaaatttttagtaataagattttaaataaattttatataaattttaatgatttatgaggtaagaatttagtattttggagttgtgtgtatttgtgtgcgtgtgtgtgtgtgtgtgtgtgtgtgtgtgtgtaatataaggattatattgaatggtaaaatgattagagttatatagaaatttataaatgttgtttaatttagatttagtttttaagaaatattgtggaaagtaaatttaatgatattgtattttattaaaaggttgtatttaaaaagtatttatgtaatgttaaaatagtagaattaaaattaattttaaaaaataagagtaaatttttttgttagttaaaaatgtagggttattattgatattattatatatagggttatagattaatttgtatgattttaaattatgggatatttaaaaattattttagttatttgaattattttagattgtatatataaagtgtgattttattaatatttaatattatattatttaaaatttataaaattagtgggttatagaggttcgtgtttgtgattttaatattttggaggttaatggaggaggattgtttgaaggtaggagtttaatagttgtttgggtaataaagtaagattttatttttataatataaaaataaattagtgtatggtggtacgtttgtaattttagttattttggaggttgaggtgagaggagcgagtttaggagtttagggttttagtgggttaggattgtgttatcgcgttcgttttagtttaggtaatagagtaagattttatttttaaaaataaataaataaataaataaattttataaaattttaaaaattatatgagatattttaggtttgtatttgttataaataaattagggatttgaagaattaaatattttattttatttatagtttgtattggtatatagtaagtagttagtaggtgttaataattagtgttattgttattttttggagattaattaataaattttatagcggatgatattatagggatgaaattaataagatttagaatatgggaatttttattagataattttatttttttagtaataatttaaagatagatagagagagagagagagagagagagaaagaagagaagagaagagaagagaagttatatatttttaaaaggttgaagaaatatatgaattaaattgatatgaggtaattagaaaaattgatatcgattgtattaaggaaatagttaattttagtgtggtaatagtattgttgttatgtttttaaaaagttattatattttagatttttataataaaataattatgaatgaagtatggtatttgaaagtatttttagaataatttagtgtgtatgtatgattaattgggtgggtttataaaattgtttatgaattgattattgttaaagtttggttgttaaaatatggtatttttttttttaatattgttgaagttttttgtaatataaagttttttaaaaaatgtattttaggaaagttttataaatataggtagagaaatattttgtttgaagttatgttagtttttaggttttttttatttttattatagttgggaaattttaagtatttaaattttgtttaagattataggaattttttaaaaatgtaattttaaagaatgtgtatgtaagaattaataatagtaaaggaaagtaaagtatttttttttttattattggttgtattaagtttttagatttgtttatatattttttaatttattaaaattgtaaaaatggtttttgagtattattatagtaataagtattatattttgttatacgtattattaaaataatgtgaaaagagatatatttattgtttttatagaatttatattttagtgggaagaaatatatatatattatataattttataaatatataattataaattttgaataatttataaaggaaaagaaaataaggtaaagtgagagagtgttgtataggaattaggtataatttgggggagattagaggtggttcgaagaagtgtattttgagatgaaataagatggtatatagtaggtaaaggataaggttgaggtagttagagtaaatgtttgagaaatttttataatacgaaagagaagatgagaataaaataatatgaaaattattatagatttaatatggaaagtttatgtaatagtaaataagtttaaagtttttttaattagaatttttaatttgtaagagtaataatagaatgttataaataattggaaaatttaataggaaggttggaaaattaagttaagaaatatgaaaaggtaaaaattgtatttattatatatagttttattagaagttgattaagaatattatttagtaaagtggaattgttaattaggaaatgggaagataaggaatttagaaaattgaatttaatgtaggattttattgaaaagggattttattatagtagttttttggtaagtaaagaacgtttgatatatgagtgatatttagaaaatgataaattattttttttaatttttagaattaagttacgagtaaagtttaagtatgtttattgttatagtagaatgttaaaatggttagttttgataatattgaaaaaagggtgtttgtattttattttggtaagtggaagtataaagtgtaggggaaaggaagggtattaatgttaataattttattttttaagaagtagaaaagagatattgtttatagttaaggaagaaattataaagattattatatttaaattatatttgtattaaaagaattatgtaagatggtttatgaattaaagtagggttttagaaaattggattattatttagttaaaaagtttttaatttaatttttagggagttttgaagttgtaagatttttttagatttggtttaatttagggaaagggtttaggatatttatattttaatattgattagttattataggtgggttttttttgggaagtggagtaaaatttgatgaggttgtttttattatttaaagtaattttgggggatgattgatagttaagggttgttagttagtaatatttttagtagtgagagaataaattttttagttttaaagggaggagtttaggtagaatagaatagtatttataatagaaacggtgttttagtttttgggaatacgtatatatttatgtagaagaaaataaataaataaataaaatatatatatagttttattttgtagtttcgttttgttatttaggttggagtgaaatggtgtggtttcggtttattgtaattttcgttttttgggttcgagtaatttttttattttagttttttaaatagttgggattataggagaatgttattatgttcggttaatttttgtatttttatttttattttattttattttttatttttatttttattttattttatttttttttttagtggatataggtgtagaatgtaattaaatttatgttatgttagatttcgttaatgtttttttttttttttttttttttttttttgtatttttttttttatttatttttatttttttattgataatttttgggtgttttttatagagggggatttggtagggttatgggataatagtggagggaaggttagtagataaataagtgaataaaggtttttggtttttttaggtagaggattttgcggtttttcgtagtgtttgtatttttgattatttgagattagggattggtgatgatttttaacgagtatgttgtttttaagtatttgtttaataaagtatattttgtatcgtttttaatttatttaattttgagtggatatagtatatgttttagagagtatagggttgggggtaaggttatagattaataggattttaaggtagaggaattttttttagtgtagaataaaatgaaaagttttttatgtttatttttttttatatagatacggtaattattcgattttttaattttttttttatttttttcgtttttttattttataaagtcgttattgttattttggttcgtttttaatgagttgttgggtatattttttagacggggtggtggtcgggtagaggggttttttattttttagtaggggcggtcgggtagaggcgttttttatttttcggacggggcggttggtcgggtaggggggttgatttttttttatttttttttcggacggggcggttggtcgggtagaggggttttttattttttagtaggggtagtcgggtagaggcgttttttatttttcggacggggcggttggtcgggcgggggggttgatttttttatttttttttcggacggggcggttggtcgggcgggggtaatttttgtatttttagtagagacggggttttattatgttggttaggtttgttttgaatttttgatttagtgattcgtttatttcggttttttaaagtattgggattataggcgtgagttacggcgttttatttaaataaatgttttttttttaatttattatttatttaaaaaataaaaatagaattattatattatttagtaattttattgttgggtatatttgtaaagaaaatgaaattagtgtattaaagaggtatttgtatttttatgtttatcgtagtattatttataatggttaggagatgttaataatttaagttttaattagtagatgagtgtataaggaaattgtggtttatatatataatggaatattatttagttttgtaaaggaaggaaattttttatattttttataatatggatgaatttggaagatattatgttaagtgaaataagttaggtacggaaagataaatattgtatgattttatttatttgtggaatttaaaaaagttaaaattatggtaggtcggggagtgggggtagtagggagggggataaggaggaatgagaagatgttggttaaaaggtataaagaagggtagggtgtggtggtttatgtttataattttattattttgggaggttgaggtaggtagattggttgagtataggagtttaagattagttgggtagtatggtgaaattttatttttataaaaaatgtaaaaattagttaggtatggttatatatgttagtagtttcggttattttagagattgaggtgggaggatggattgagttcgggaagtgaaggttgtagtgagttgtgatcgtattattgtattttagttagatttagatttcgttttagaaaaaaagtataaagttttagttaggtaggaggaataagtattgaagatcgattgtatagtatggtgattacggttaataataatgtatagtcgtttttcggtatttacgagggatttgttttagtattttttttgtatattaaaatttgagaatgtttaggttttttattaaaaacgttttagtttttgtatataaattaagtttatttttttgtatattttaaattatttttagattatatttagaatatttaatgtaatgtaaatgttatgaaaatagttgttatgttttattgtttttgaatcggaattatttttatagttatattgttagtttttatttttttttaaatatttttaatttatagttgaatgaatgagaggatgtgaaatttatagatatagagggttaattgtattgtatatttgaaaattgtagagagagattttaaatatttatattattaaaaagtgaagtgatggatatgttaattagtttggtttaattatatgtattaaaaaaattatatagtattttgtaaatttatagtgatttattaattaaaaataattaatgagtttaaaatttttttggagtgtaatatttttaatttttttttgtttaaataaagttttttgtttttttatttttttaatttgttttaaaaaattattttttaatttttattaatttagttgatttattttattaatttaaggattttttttttttttaagttaaatattttatgataattaggaagggtaaggttatgttgtaataagattttaatttatagtaaaaagtagattttagtgatttaatttaataaggagatttaattttatcgttatttaaatgatttagattatggagtttttagtattttatatattattatgtatttatttgtaagttttattggttattgttagttaaatgtttttaatttaatagcggaaaagattgagaaatgtataggagttttggaatattggtaagtattattgtttttaaaagttatattgttattatttaaggtaaggataaatgtttaagattagtaggttgttttttagaatatttatacgtttttttttaagttatatgttgagtaagatttagttttttgtgttagtaaatttatttatagacgatgtatttattattttaattaattatttattaaagattatattatttaatgaaatttgggtgtaaaatatagttgtttttatgaaattgttaatggaagaaagagaagacgattttgattttttcgttaataaagaattttttagtatgtgtgtttagtgtgataatgttgaattgtaagaatgttttagaatataatttattatttattttaattatagggtttatgttttaattagaaaaattagatttcgatgtttttttaaattttgagttttgtttaatttttagttttgttttttttttttgtagggttaaaagttaggagttatatatagagattgaggatacgttggataatttagtatatgttttttttatttttttaaaagtgttatttttttttgatttttatggtgaatgatagtgtttattttgaggaagaggataaaatcggtataaaatttttgattttatttagaattttgtttggggaaaatttagattataattttggggagtagaattttaagtgttggtgtttttttgtgcgttagtgtttttgtttgaggatttgtatgatagtttggagtataggagatgaaggttttaaggagatttagttttttattttgattttatttataagaaggaagagtttgttaaagattttttacgtttagtgtgtgggtgagggagaaaggaagatgggatgtttgtttttagggttatggttttatataatttcgtagaagtttttagattttggttttatgacgaaatttagagattgagatgtagattagttttagggttgggtttatattaaaggggttatagtgtgtagtgattttttttataatcgggaaaagagtgttattaggaattaataggttataacgtttatgataaagggagtttagataaggagtggaatgattatgaataggtatttttaatgagggattttagaattagagggagttttgttatttgttttgtgggttttataagaaataaattgttttttatatttttttattgtgaggaggttgtggaggttgaggtgttttatatggttggtgtagatatttgtatattggaagttatttttaggattataaggatttggaaaatttagtttttttttttaataagagcgatggatataatgttggttgttagtatttcgtgtataggataatgtgtttgagaggtgtgtatgttatttaggtttggttaattagaattttttttaaagttgttaaaattttggtagatattttagaaatatatattaatagagatagataaatagatatatatatatatatatagtaagagagagagatgagataagatatgaagtgataaggaagagaaatgtagaaaaatagatgtaaaaagaaatacggagatagaaaaaatgtagataaatagtgattatggattagaaaaatagaaaggtaataatgtagtgaaagatataataagggggtagagataaagatgtagagagatacgtagaaagaattatatagggataaagagatatagaaagagaggtagatttatagatagagatataatagaaagagaggtgaagattttattgtgtatttggaattagttatttttgaaattaatttgattttaggttttttttgtattatgaataaaatatatttgggtttttattatttagaattaaaaataatatttttattgttggttatgtttttttaaaagtaaaaattatttttgattgatgtgatttgttagaatgtttgaaatattagtgattaagggttattatatttgtttttaaataattttattatgtttatttatatagtatttattaaattagaagagaggttgggatatttttaggttattgtattgaatattaatatgaaagaattatgaatgatgtaataattgagttgattttttattttttttgtttattatgattttgtattttaaatttttttagtgtttttttaaggtataattttttttttgggtataggttggttgggttattttaaggtatgtttttttattttgtagtgattttttgtttttgtttaattaaggaagtttagaatatagataatttaggattatgtttaattatgtaaaaaagttttaaagttaggtaatggtttttatgtgttttttttgagtagtttgaggagagaatagaaatagaaattttttggggtttgagtagatgtagttggtcgtgtataggtagaggttgtgggttagtgtaggaagtagggttatagttattcgttttaaggtggggatgaaaggagatgatttggtggttgcgtgatagttattgtaggattttgattttagggggataggttgatatagatagttgggaattttgggtagggataagtaggcgttatagaaaagtgataattaattttagttaaaatagttttaggagttagtgtaggagttttgaagaagagagaagagggatgattagtatagggtacgttggtgggtttgttattttttttattttttaggggttttttgtagttttagatagataaagttgaggtttagagtgtattgttattattttttttaagatttgtgtaaaggtgaaattagtttatgaagatatagaattttagtttgatgtagatgtgtgggaggtgggggaatagttgttatttttttggtgaatatgaagggtttaatttttttaggaaattggatgatattttatttttattattagtagttttttttagttattggaaaatgtttataggtagtagttattattatgtggtataaagtgggtattattttagtgtttaatatttaagtcgtggttttggttttatatttaataggaagatattattaaagttaaggtttggttttggggaataatttttggagatttttagaaattggtaaattttatttttaagttttgatttttatagtagtaaatatattatgaatagagattattattgttaggtatatttagtttatgttttttttttttatatttgtgttttttttatattggattacggttgaaatattatttgttggtggaggtttttgaggttttataaaaggaagttatgtagagaaaggttttattatatgaatagttatttttttattttaaaggaaaatgatatatgtgatttaattagagttatattttttttttatttatgttttttaagtttttaagtattttaatttaaaattttttaaaataaaggaaattgttattagaaggtaaggaggtcgaggttttgatttttttaatggaggaagtttttggaaaggagttagtgagataatgatgaatggtaaggatgttttggaataagttttattagttagttttgtgatagggttattttttagttagtaaaattagattttaatgttttttttaattttgttttgtttttttttatttttagtttagtttttttttttttagggttaggaggaaagagttatatttagagataggatttttttgaatagagggtttgggttataggttatttttttttttttttttggggttttttatttttttgatttttgtgatggatgataaggtttagttcgaggaagattagttttagtacgaagtttttaatgttatttagtattttgttttgggtagatttagattgagtttttgagaagtagagtttgagtgttagtgtttgtttttatattttatagtttttttgatgaggagttgaagtttagtttgagatgtaggaggtgaaggtattaaaggaatttagttttttatttagattatttttaagggagggaaaggttagttaataggtttttggatatagtgagtaggtgatagagtggggaagtagatttttattttttaggaatttatttataaatttagattttaagattttagttattagttttaataattagttttttagagtaattaggattgggatttagagtaatagtatgtagagtaatttttttagtatttggaaaggtgatgagattaggatttttttgatgtattcgttatggaattagaggtgttttagttttttgtgatttttagtttagtagtgatattagggataagagatgggaagggatgggttagaaggagttttgttttttgttttgtggggtttatagtaatagaaatttaatatttttttacgttattttacggtgatggggttttggaggttggggtgttttacgtggtaggtgtagacgtttttacgttggggagttatttttagtattattaggatttggaaggtttagttattatttttaataaggggggtggatataacgttagttgtttttttttggttatttcgaaattatcggattttgatttgggttggatagaaatttgttatcgagtagattagtaggttgtggtggttgagggtttttgttttggatggggagatggttattgtgggttttattgagggtagtaatagatagggaaagatataggagtgagatgtgagattatatagtatgtttgttgtgaggaaggtttttttttggaattagagtggaaagatatttggagtttaagttttggattaaggtttttttaataaatataaatataataattattgagaatttaaagataaataatatattatggtttttgtttttataaaatgtgtaatttagtaatagatagtaaaaaataaaaagaatgttattttaaaagtttgtaatatttgaaaaaaatttaggtaggttttgaaaataaataatattgattaaatattatgtttgttcgtaattcgatttttttatttttttagattgttgtttatagtaaaaatattatatttttttatatattttattttttattttttaggttattttattgtattttttttatttttttagtgtgaaattatagtaaatatttaatgtatgttttttttatttagtaatatgtttttttatttttttttttttttaatttttttttattatataagtgagtttaattatagttgtttattttattttatttttttgttattgagaattattttttttttttgaaattaggtattattatgtatgttttttatagaaaatattttgagatttgtgtagtggtcggtttgggttaatgattttgtaatgtgaatatataaatatagttgggatttgttgaggttattaggtggtattttaattaaatggtatttatgagttattatttggaagaaattacggtttttgtttggatttgaatttttttttaggtttttttttttggagtttaatagaaataatagttagttatgtggttttataagatttgtttattttaaatagattgggagtaaaaatagagggtataaatttatgagaaaagatgataaaataaattttatggaaatggaattgaaatagtaaaaatataagtatttgttggtattaggatgtgaattaaaagaaggtaagggagtattaagtaaattaaaggttttgtaaatttgtatagataatattggggttagattagggattgattaattatgaatttttaatgttttgaaagtattattttgttttattaatatggaaaatatataggaatagatttattgttgtttttggttaaaattggttttaacgaggttttacgttttttagattttatggatgtgtagtgaagaatataaagaatgttgtgtattttgggaggtttaaggttttggtgagtaattatgggttgattatttaaagtgtttattatgtattaatattagtttatagtgattatttttttatttatgattaataaagtgtttattatgtattaatatataaagtggtgatgttaatttttgatgtataagtaattgtgagattaaatgacgtaatatagatggtatttgataaggtaattgtttagaaataaatgtttattaaatgggtaaaattgatttttagaatgtttatttttgaagtggatagttatggggggaggggagaatttaggttaaaagtaattcgaaattatttttatttaataatttaatggttttaatttatttattttaaaatttttgttttttgtattgtgttatttgtttagtttttttaagaaattaaaagtgtcggtcgggtattgtggtttatatttgtaattttagtattttgggaggtcgaggcgggcggattatgaggttaggagatttagattattttggttaatacggtgaaatttcgtttttattaaaaatataaaaaaattagtcgggcgtggtggtacgcgtttgtaattttatttatttaggaggttgaggtaggagaatggcgtgaattcgggaggcggagtttgtagtgagtcgagatcgcgttattgtatttcggtttgggcgatagagtgagaattcgttttaaaaaaaaaaaaaaaagaaaagaaaagaaatttaaattgttttataatattttttaagcgttgtttttatttttagtaaaaatttttttttttagattttgtatttataaattttattaagatttaagttaataagagtttattttaaagtattaagtaaaattatagaaaataattaataaagtttatttttaaggttttgtttattttttttttttttttgagtttaagtggatgggtagttgagtatatttatttattaatttaatagaagattattgagtttatattatatattagttaatgtgttaggtattaggtatgtaatgattaaaatatttttattttaaagatttttgttatgaatgagagtatttaagaaaatagaattacgatgaataatgatttgaagttaaaagttaaaatattttattttataattgtaattgttgaatgttttgcgcgtagttgtggaatagttttaattttattaggttaagtttgaagttttttgttgtaagagttgtgtacgtgggttttgttgggtggggtagtgttagtggggcgggcgggcgggtaggggaagagggcgggtattttgagtagagagagttgtttagtaaaggtaaggtaaaaggaggtaaatgtataaggtacgaggtaagaatatgtagagtagaggataaggtcgacgaacgggtaggttggggcgatattaggtagtttggttaattttgtttgtttttttgttttgttttaggttttcgtattttcgatgtatttgtttttattattttcgtcgttgttttttgttttttggggtggaataaacggggtttaggttttagaggttacgatttttcgttttttttggcgtagagatttggggttaagggtgggtttcgtagaggggcgacgtcgtttatttcgtcgttgtaaggtcgtgcggagttttaattggtagttgtgtttgtatattttgtttatcgtcgttcgttttttttttaggatgtttttttggttgttttagtattcggcggtaggtagttttagtagcgttatcgttcggaatttttttacgtcgttgtcgaagcgtacgattttttttcggttatagatgtttttgtttataagacgtacgcgttttgtttcgttggtgaagtagtatatgtttttaaattggtatacgaaattttttgcgaggaattatcggttagttagtgcggtttagttcgttcgttttcgtagtcgttattttgattcggttcggagttgtggaatagttcgcgcgattataagttttcgtcggttcgtgtttcgcgttgtagatttgggattttttcggcggttttgtttagttttgttcgttttttcggggttttcgggaattcgtttttttataggtaggaaagggaggaaagttttgtttttgtttcggtttgtgaattaagtgaagaggtagtcgggttgattttatatggatttttgtatttagagggattagggcgttttcgtatgaaattttattttttatggagtttttgggtattttagagataaagttatttatataaatttgatagtttaagggaatgacgagataggtttaggaattaaatttgttttttttcgatacgtttatttttttggtttttgggtaaaatatttttttttttatgtttggatttatttttttaagtgttttgtgaggtttatttacgtttgtgttagaaagaagggagttttagatttttgagttttagaaagaaatatttatttatcgaaagagtataagtttttgaatttgataaattagatttttattaaattgtggtagttattagttcgggtagtttatgtaatagaatatttatattataagtataattgtgtaaaagaaaattatgatatttatatataggatgttagaaggagtgagagagaatttatgtaaagtattgttttgtgtttgaaatgagtggttttatagtatgtgttattttttttttttatatttttttttttattaaatttagtttattattaattcgggtatttgaattttatttaggttattatttgtttataaattagtgaaatttgaaggttttttttttgtggttagttagttagttttttttagtattaagattttgtttttataaacgttttattgggttaggaatatagataatttttttttaaatacggagattatagatattattgttgttttgtattttttaatgtaggaaattataatatttagtttaggtaagttttgggatacgtttaaatggtaaattttgttgtgtttttggagaaatttatatttttaaaaataattttatgtttattttgttttattattggtagtaaatgaatattttgtttttttttttttttttttttttttttttttttaggtttaagtttgtaggatgggattggattgtttttattttattattaaaagataaatggaaatgtaatatagtttttttttttaaaatagaggaaatgttgataaaagattgtgttcgagattatggagattattattttcgtattttagtttaaggagagtttgtttttagagtagcggttttggagagtagttgttttgtatttatcgggagagtttttgtttttagttattggggtgtttagtatcgatagtattaaggttatagttgttgttcgaaggttttcggggattcgtaaagtttttttttaagatataattgagacgaagggaaaagtggtagttaatatagttcggatttgatggatttgatgtatttggtagaaagaataaaaatttgtggatgtttttatgcgtggtaggattggatggttttttggaaaggaattaattagtattggagttgaaggattttagttgtttttgggtagattttttttttgtgaaggttttgaatttagtgtttggtattgtgacgttttttaattgtattggatgaatatttgaggtgaaaatttttttttaattatggaagagttgaagattgaatgtttaagggattttaagaagttaaagaaaaatgcgatttaatagtaaatatttttgtaatattgattaaaaattagttgtttttatatttgggatttttttaatagggtaaattaagtggggattatattttaggggagagaaaattgttgttatagatatttttattgttgttgttttagatatattttgaggagttttaagttttggtgaaaagagtaaagtttttagaaggaaataatggtgagttgtagttttattattaatgtgttttatgagagttaataaattattgaatttatttttgttttaggtttttttttgtaaaatgtggattatgttttatgtattttatatttagatttttatatatataaatttaagattaatatgatttgtttaatgttataaaaggatttttaattgttatgtgtaattattaggttaatatgtggaataagaaaataagttaaaaaaaattgatatttatttttgttggtaaatgattttttattacgtaagaatatattgtatttatatttttcgagtgaaagtatttgaaaagttaattaagttgatattttttttttaagttttttagttgtttaaattttttttgaattatgaaataggtgtatttgatattagtaaaggtataatatataaatttttatagtatttagatatagttatgtttagatttgaggagagagagtaaaagttgtggagaagtattttttaggttttgaatagtattaatgatggagaaaatgtttagagttatagattgtattgtgttagttttaaatattaaattttaagtggtagaggtattaatgtggttttttttaattttatgtattttttatttaatagttttttatggatatatttatattaatgtgtttttataaataagtataatttattaagttttttttggtagtgattagggatagtattaatggttataaagtaattagaataatgtttggtaaatattatttttgattttaattaagataataaatatttttatttttttttttttttttttttttttttttttttttttaaaattttaggttttgtttttaaagtagagaatataatttaaaattagaatataagtttattaggtaaaaagaagtagggaagaggtaatagtaagaggtttgtaatagtggtatatgaaagcgttgagttattttaatattttgtattatttatagtataattttagagtatttgagattgggaaagttgttattgggcgtttagtagtagtggtttatttaggattagggtaaatttagtttaaggatggtttttattgttgtgatggatatataaaggaggaattatatttatatttggaatggagttggggtaaggaagagtaggtagagagatttgaagttgtttttaatgtttttttttagtttttattttagtgttttttagaatagaggtttttaatttatttttttttttttgtttaagggaaaaattttttataggtttattttgaggtaattgttacgttagatttggggattttttagttttataggttttttcgtatagattttttagttagtaataagtgttattttagagtttttttttgattggttaaaattttattggaaaggttttgttttgggtttttgttagttgtgtttgtttggtttagttttttgtatagttgattattttggttttatttttgttgtattatttagggtatttaggtagaagaaggttagagaagaaagaaattaggttaagtatttttatttcgagtgttttatttgaatcgtttgtttagtttttgtggaggtagagtaattagagtatttattttatgtgggtaaatgggttaaaaagttattgttattagtagggacggttagggttatagtaggtagatttaatttaagggatattttttttttttttaggttggaaggaaaagttgtggattttttttttgtgaaaattaagggagaaattattttttttggttaatattttttggaatttgtgtttggttagtggaattgaatgtgaatataggagttattttgttattagaaggattatttaggattttattttgtatttattttaggaattaagaattattgtatattttgaaaggttttgtggtttttttaatgttaatggtaatataattagaaatgttgtttttagaatattgtttttttttaattaaaatttattaagtaattatttttaaatttttaaaaatttttgtgaagttttttatatattttttttatattaatttttaggtaattagttatatataagaattttttatggtatatataaattaggtttttttttttggtataaagttatttttttaaaattttagtttagagaatttgaagaaagagttaaattagtagtatttaggggttgtgtttagatagtgttttttataagtaagtggttatggtgaaattttagggtggaagttatgttagaattggaggatgatggagcgtgaaggagtaggagtatgggaaaagttttagtaggaaggtagaaaattaggtgatataaagtatttggaatatttgagggtaaatgaggaacgtgagtgattttggtatagaagtttagattttattagttttacggttttttatgttttatgaaaatagtttttgaagatcgaagaagattgggataaaaatttaagttgtttgttgtgggtatgttgtataatgaagttttgttttttgatttatttttttaggttttttttttttgttagtttttttatttacgtattgttttagttggattattggtgattaaattttttagagttagtttatatatgttattttttttaatatatttttgtttgtttttatttttggttttttagtgatgtttgggatatttttagagatagttttttttttagtttttagattagtagttattatgtttttttatttttagaaaaaatttaaatatttttttgtgagatttttataatgttttttttttttgtaagtttttattagtaaagagaggttttaatgtttagttatataaaaatatatatagtttttgagtatttaaatttatatttaagtatttaagaatttatgtgtttaagaatttagtttaaggttatggtttatgtaaaatagtaatattagtagtaatattttggggagagtatttttatattattaaataggaaaatttaagatattttatttaaattataatgatatattattttatattagttagaatggttattattaaaaagataaaagataataagtgttaaggatgtagataaaaggaaatatttgtatattgttggtggggatgtagattagtataattattatggaaaatagtatggaagttttttaaaaagttaaaaatagaattattatatgatgtagtaattttatttgtaggatgtagataaagtatttaaaattagtatgttgaaaatatatttatatttttatgttttttgtagtattatttataatagttaaggtatagaattaatttgtgttatttagtggatgaaaagataaagaaaatgtggtatatatatataattaaattttatttaggttttaaaaagaaggaaattttgttgtaagttaaaaagtgattgaggtaggttttaattaattaaaggtttattttgttaaggttgaggaatatatttgggaaaaatataaaatataggagtatttgtgatttatgtttttgttaaagagggttttgagaattttagtatttaaaagagaaagagtaagtaggaggggaaggagaaaaaaaaggaggaagagtaggttatgatataagtggttatatttttgagtttttgattagtttaagtaaatttatattttatttgtgaaaagagagtagaagaaaaagttaattataaattattttatgtttagtaaatttatattttatataaaattaagggaatttgaaaagggggaaggagtagaggaaacgaggttatgatacggggttgtgaaattatcgttatttgtttgggaataaaaggaagatagtattggtgttttagtttttaagattaatttttttttggtataatgagtttggggttttaagattttattttttttttatattgttatttttgataatatgtatgaatttagaggatattaagttaagtgaaataagttagatatggaaagataagtaatgtatgattttatttatatgaggaatttaaaaaattttatttttgaattgaattgtttattttattttattttgttttatgttttagcgtatatgtgtaggatatgtaggtttgttatatgggtaaacgtgtggtatggcggtttgttgtagttattaatttattatttaggtattaagtttagtatgtatgagttatttattttgatgttgtttttgtttttattttttataggttttagtgtgtgttgtttttttttttgtgtttatgtgtttttattgtttagtttttaattattagtgagaatatgtagtatttggttttttgtttttttattattttgttgaggataatggtttttagttttatttatgtttttgtaaaagatataattttatttttttttatggttgtatagtattttatggtgtgtatgaattatattttttttatttagtttattattgatggatatttgggttggttttatgtttttggtattgtgaataatgttttagtaaatatatatatgtatgtatttttataatagaatgatttatatttttttgggtatatatttaatgatatggtttggttgtgtttttatttaaattttaatttgaattgtattttttagaatttttatatgttgtgggagggatttagggggaggtaattcgattatgggagttagttttttttatgttatttttataatagtgaataagttttataatatttgatgggtttattaggggtttttgtttttgttttttttttatttttttttgtcgtagttatgtaaaaagtgttttttattttttataatgattttgaggtttttttagttatgtggaattgtaagtttaattaaattttttattttttttagtttttagtatgtttttattagtagtgtgaaaacgaatttatatagtaaattggttttaggagtggggtgttattgaaaagatatttaaaaatgtggaagtaattttggattgggtaatagatagaggttggagtagtttggagggttttaaagaagataggaaaatgtgggaaagtttggaattttttagaaatttgttgaatagttttgataaaaatgttgatagtgatatgaataataaggtttaggttaaggtggttttagatggagataagaaatttgttgggaattggagtaaaggtgatttttgttatgttttagtaaatagattggaggtattttgtttttgttttagagattcgtggaattttgaatttgagagagatgatttagggtatttggtagaagaaatttttaagtagtaaaatatttaagaggtgatttgggtattgttaaaagtatttcgttttaaaagggaaatagagtataatagtttagaaaaattgtagtttggtgatgtagtagaaaagaaaaatttattttttaggaaaaatttaagttagttgtagaaatttgtataagtagtaaggagtttagtattaatttttaagattatgggaaaatgtttttaggttatgttagagatttttatagtagttttttttattacggaattagaggtttaggaggaaaaagtggttttgtggattaggtttagcgtttttttgttgtgtgtagtttagggatttggtgttttgtgttttagtttttttagttatggttgaaagaggttaatgtatagtttaggttgtggttttagagagtggaagttttaagttttggtagtttttatgtggtgttgagtttgcgggtgtatagaagttaagaattgaggtttggaaatttttatttagattttaggagatgtagggaaacgtttaaatgtttaggtaaaagtttgttttaggaatagggattttatggagaatttttgatagggtagtgtggaagggaaatgtggggttatagtttttaaataaagtttttattgagatattgtttagtcgagttgtgagaagagggttattattttttagattttagaatggtagatttattgatagtttgtattgtgggtttggaaaagttatagatatttaaagttagtttttgaaagtagttaggagagaggttgtattttgtatagttatagaggtagagttgtttaagattatgggaatatattttttgtattggcgtgatttagatgtgagatttggagttaaaggagattattttggagttttaaaattgattgtagttgggtgtggtggtttatgtttgtaattttagtattttgaaagattaaggtgggcggattacgaggttaggagattgagattattttggttaatatagtgaaattttgtttttattaaaaatataaaaaagttagttaggtatggtggtaggtatttgtagttttagttatttggaaggttgaggtaggagaatggcgtgaatttaggaggtagagtttgtagtgagtagagatggcgttattgtattttagtttggacgatagagcgagattttgttttaaaaaataaataaataaaaataaaaataaataaaataataaaataaaaaaatttgattgttttgttggattttagatttgtgtgtgttttgtaatttttttgttttggttaattttttttatttggaatggttgtatttatttaatatttgtatttttattgtatttaaaaagtaattagtttgtttttgattttataggtttataggtggaagggatttgttttgttttagatgagattttggattatggatttttgggttaatgttgaaatgagttaagattttggggaattgttgggaaggtatgattggttttgaaatgtgaggaaatgagatttggagtggtttaggggaagaatagtatggtttgtttgtgtttttatttaaattttaatttgaattatattttttagaaattttacgtgttgtaggagggatttaatgggaggtaattgaattatgggagttagttttttttttgttatttttatgatagtggataagtcgtacgagatttgatgggtttattaggggtttttgtttttgttttttttttatttttttttgttattgttatgtaagaagtgtttttcgtttttcgttatgattttgaggtttttttagttatgtggaattgtaagtttaatgatatttttttttttttttagtttcgggtatgtttttattagtagtatgaaaacgaattaatatatttagtaatagaatagttgggttaaatggtatttttggttttaggtttgtgaagaattgttatattgttttttataatggttgaattaatttatattttcgttaatagtataaaagtgttttttttttttttgaagttttgatagtatttgtggttttttgagtttttagtaattattatattgattggtatgagatggtattttattgtgattttaatttgtatttttttaatgattagtgatgttaggttttttttatatgtttgggtgttatataaatgtttttttttggaagtgtttgttaatgttttttgtttattttttaatgtttttttttttttgtaaatttgtttaagttttttgtagattttggatattagatttttgtaagatggataggttataaaattttttttatattttgtgggttgtttgtttattttgataatagtttattttgttgtagagaagttttttagtttaattagattttatttgttagtatttgtttttgttgtaattgtttttgatgtttttgttatgaagtttttgtttatgtttatgttttgagtggtgttgtttagatttttttttagggtttttatagttttgggttttatatttaagtttttaatttattttgagttaatttttgtataaggtgtaaggaaggggtttagttttaattttatgtatatggttagttagtttttttagtattatttattaaatagggaattttttttttattgtttgtttttattaggttttttgaagattagttggttgtagatgtgtggttttatttttgagttttgtgttttgttttattggtttgtttttgtattagtattatgttgttttggttattttagttttgtagtgtagtttgaagttaggtagtatgatgtttttaattttgttttttttgtttaggatgattgttttggttaatgggtttttggtttcgtgtgaatttttaaatagtttttttttaattttgtgaagaatgttagtggtagtttgacgggaatagtattgaatttataaattattttgggtagtatggttatttttatgatattgattttttgtatttatgagtatgggatatttgtttatttgtttgtgttttttttgatttttttgagtagtggtttgtaaatttttttgaagagggttttttttttttttgttggttgtatttttaggtatttattttttgtagtaattgtgaatgggagtttatttatgatttggttttttgtttgtttgttgttggcgtataggaatgtttgtgatttttgtatattgattttgtattttgagattgttgaagttttttatgagtttaagaagttttggattgagataatgggattttttaggatttaggattatgttatttgtaaagaaagataatttgattttttttttttttatttaaatatgttttattttttttttttgtttgattgttttggttagaaattttaatattatgttgaataggagtggtgagagtgggtattgttgttttgtgtatgtgtttaaggggaatgtttttggtttttgtttatttagtatgatattgtttgtgggtttgttataagtgatttttattattatgaggtatgtttttttaatatttagtttattgagagtttttaatatgaagggatgttgaattttattgaaggttttttttgtgtttattgagataattatgtggtttttgtttttagttttgtttatttaatgaattatgtttattgatttgtatatgttgaaatagtttggtattttggtgatgaagttaatttgatcgtggtggataaattttttgatatgttggtggattcggtttgttattattttattgaggatttttttttattagtgtttattagagatattggtttgaagttttttttttttgttgtatttgtgttaggttttgttattaggatgatgttggttttataaaataagttagggaggagttttttttttttaattatttggaatagttttagaagaaatggtattagtttttttttgtatttttggtggaatttagttgtaaatttgtttggttttgggtttttatttttgttggtaggttatttattatgttttaattttagaattcgttattcgtttattgagggatttaattttttggtttaattttgggaaggtgtatgtgtttaggaattttttttagatttttttagtttatgtgtatagaggtgtttatagtattttttgatggttgtttgtatttttatggggttagtggtgatattttttttattattttttattgtgtttatttgatttttttttttattattttttattagtttagttggtagtttgtttatattattaatatttttaaaagattagattttggattcgttgattttttgaagagttttttggtgtttttgttttttttagttttagtttgattttggttattttttgttttttgttagttttggggtttgtttgtttttggttttgtagtttttttagttgtgatgttacgatgtcgatttgaaatttttttagttttttgatgtgtgtatttagtattataaattttttatttaatattgttttagttgtattttagagattttgatatattgtttttttttttttattggttttaaagaattttttgatttttgtattaattttattatttatttaggagttatataggagtaggttgtttaatttttatgtagttgtgtggtttggaatgaattttttaattttgagttttaatttgattttattatggtttgagagattgtttgttatgatttcggtttttttgtatttgttgaggagtgttttatttttaaatatgtgaataattttagaataagtgttatgtggtattaagaagaatgtatatttcgtttttttgggcggagagttttgtagatattttttaggtttatttgatttagtgttgagtttaagttttgaatatttttgtttttttttaattttattattattatattttaagttttagggtatatgtgtataatgtgtaggtttgttatgtatgtatatatgtgttatgttggtgtgttgtatttattaattcgttatttagtattaggtatattttttaatgttatttttttttttttttttttattttataatagttttcggtgtgtgatgtttttttttttgtgtttatgtgtttttattgtttaatttttatttatgaatatttttgttaattttttgttttaatgatttgtttaatattgatagtggggtgttaaagttttttattattattgtgtgagaatttgagtgtttttataggtttttaagaatttgttttatgaatttgggtgtttttgtgttggcggatgtatatttaggttagttagttttttttgttgaattgaattttttattattatataatgtttttttttgttttttatgatttttgttggtttaaagtttgttttgttagtaattaggattgtaatttttgtttttttttttgttgtttatttgtttggtagatttttttttatttttttattttgaatgtatgcgtgttttcgtatatgagatgggttttttgtatataatatattgatgagttttgattttttatttagtttgttattttgtgttttttaattggggtatttagtttatttatatttaaggttaatattgttatgtgtgaatttgattttgttattatgatgttagttggttgttttgtagatttgtttatgtagttgttttatagtgttattggtttgtgtattttagtgtgtttttgtagtggttggtaatggttttttttttttatatttagtgttttttttaggagtttttgtaaggtagatttggtggtgataaatttttttagtatttgtttgattgaaaaggattgtatttttttttcgtttatgaagtttagtttggttagatatgaaattttagattggaaattattttttttaagaatgttgaatattggttattaattttttttggtttgtagggtgtttgttgagaggtttgttgttatttttacggttttttttttgaaggtgatttggttttttattttggttatttttaatatttttttttttatttcgattttggagaatttgatgattatgtgttttggggttgatttttttatggagtattttatttggtttttttgaattttttgaatttgaatattggtttgttttgttggtgatattttgaagtatgttttttaatttaggtaatttttttcgttttttttaggtattttaattagttatagttttagttttttttatataattttatagtttttggaggttttgtttatttttttttattttttttttttgtaatattgtttgtttgttttattttggtaagatggtttttaagttttgagattttttttattgtttggtttatttggttattgatatttgtgggtggattgtaaagtttttgtgttgtgttttttagttttattaatttatttatgtttttttttaaattggttattttggttaattggttaatagtttttgtaatgttttattatggtttttagtttttttgtattgggttggaatatattttttttgtttagtgaagtttattattatttattttttgaagtttatttttgttaagttatttattttagttttagtttagttttgtgttattgttggagaggtgttgtaattatttggaggagaagagacgttatggatttttgtatttttagtatttgttgttgattttttcgtatttttatgggtttatttatttttaatttttgaaaatgttaatttttggttgggggttttgtggggttttttgttgttgttgttgttattgttattgttgttttttgattattttttttttaaaagttaggatttttttttatagagtggttgtggtttgtcgggggtttattttagatttaatttatttgggttttttttgtatttggaggtgttattagtggaggttgtagaatagtaaaggtggttgtttgtttttttttttggtagttttattttagggtattgatttgatgttggttagaattgttttgtatgaattgtttagtaatttttgttggaaggttttatttagttaggaggtatgggattatgggattaaggatttgtttaaggaagtattttggttgtttattggtggagtaggtgtatcgtgttggggggaattttttttttttggattgttaggttttttagagttaataggtaggaaagaggaagttttttgaattgtggagattgtggttatttttttttttaggggatggatagttatagtttttatagtttatgagtagagttttgtttataaatttttagttggagttgttgaaatttttgtagagaggttttattaagcgaagaaggatggattcggattttatttatagaagtagtttggttacgatttgttatagttgttgtgttgtattgtggggagtttttgttagtttaaattatttagtttttttagtagtgggacgggaaaatggttaattggagttatagtaacggtagttatttttttttttagaaatttagttgttttaattagtttttaatatgttgttattggttataattttagtagttattaagagtgtgtatagttttgtgtttgggatttaaggttttggtggtatgggtttataagaatattttttgattaggagtatagattagtttgtatagatgtatgaaaaaagtatggtttttttggtggggtagtataattatttattattttttttggtttggggtgggagttttttttattttttgtgatttttgggtgggttgttgttttattttgtttttttttattttttgtgagttgtgttaattgtttagttaatattaatgagaaaatttggatattttagtagaaggtatagtgtttattcgttgtttttattttttttagtgggagttatagattagagttatttttaattaatatttttggttttttttttgtttttttattgttgggttttagaatttttttataaattttggattttttttaagagatagtgttttttttttttgtttatttgtttaggttggttttgaatttttgggtttaagtaatgtttttgttttagtttattaagtagttgggattataggtatgaggtattatgtttgattatattttggatattgattttttatgagatatattatttgttaatatttttttttattttgttgattattatgtttattttattggtattgttttttcgtgtatagaatttttaaagtttttatgttatatttattaaagagaaagtttaagatatgatatagaagagtaataggaatatgttatgtatatatagttgttatttaattaaattaattgatttttgtaatgtgttatttggggtaaaaataataatattgtagaatttttttaagagattaattttttatttttaaagattaataattttatttaagtaaattattgtaaaggtattttgattggtttttttgtttttattttataatgtagatattgtttataaatttaagttaatttttttgaatgttagtttttttaattgtaaaatgagaatatttattttatggagtaatgttggggattaaatgaaatggtaaatataaagtattaaaaatagtgttgaatatatagtagataataataattatttttaaatattttaaatatatttttatattaatagtttttggggtataaatgattttttgttatatggataaattgtatagttgtgaaatttgagattttagtgtatttgttatttaagtagtataaattgtatttaatatgtagttttttattttttatttttattttattttttttttttttgagtttttaatgtttattttattattttgtatgtttttgtgtatttatagtttagtttttatttgtaagtgagaatatacggtatttgtttttttttttttgagttagaagttttaaattttgatgaagtttaatttatttattttttttttttttgtttatgtttttggtgttatgtttaggaaattatagtttaattaaatgttatgaagatttttttttatgtttttttttaatggtttggtagttttaagttttatatttaggtttttgatttattttgagtttatattgtttacgatttaaggtaagaatttaattttatttttttgtatgtggattttagtttttttagtattattgttgaaaaggttgttttttttttaattaatggtttttgtatttttgttgaaaatcgtttgatagtatatgttagggtaattttttggttttgatattgtgttttagttatataagatgtgataattggggaaaattggatgaagggtatagagaatttttttgtattattttggtaattttttttgaatttataatgattttaaaatataatattgaaaaataaagttaattaaaataatatgtttatttaaaaagaaaattaatttaataaggtatttaataaaaattattcgaagtgaaatataaagagaaaagaagagtgggggataaaagtaaaatagagtatttacgagttgtagtattatattaaatggtattatatttttgtttgaaaagtgttaaatatttatttatttgtttttaaataaggttttattttgttgtttagattagagtgtagtggtgtagttatggtttattgtagttttgattttttgggtttaagtgatttttttattttattttttcgagtagttgggattataggtttgtattattatatttagttaatttttgtattttttgtaaagatggtgtttttttatgttatttagattggttttaaatttttgggtttaagtaattttttagttttggttttttaaattgttgggattgttatatttgatttattttttaaatttatttttattatttgtttttttttgtgttttattttgaataatttttattgatttattttaaatttattgatgttttttagggttgtgttaagtttgttgatgagtttgataaatgtatttttaatttttgttaatgtatttttattttattttaattttatttttttttagattttttatttttgtcgaaattatttatttaatttagtatgttgtttatttttttataagagattttagtatattaattatagtttatgaagtaggtttattaattattaattttaaaggaggatttttattgtgtggagaatagtaaagattattattatgttaattattaggaaaagaagtttagatatttttttttattgtattttgagttattgtttaggtttattatatattggttatttattatttgagtttgatgaaatagaatatgtttatatataagttatgtaaagtaggtttattatttatagattagtagtaagggatagaagaagttttagttttattgtgagttagttttttaaagtttaagaaagttgtttgggatatataaagtattgattatattaattattatattatgatttaaagtgtaagttataagttaaatttttgattattttatttatattatatgttttagattataattattggaaaatttttttaatagtaattttgtatgaatttatgtgttttaaaattataattaagtgtgtatttttttttgataggtatttaatatattaagtgattatatgatttaaattgtttatatgatgttgagagttataagatttatagatttttaagtttgggtatattaattataatttattatgtaattaaagtagtatatttgaaattagattttagtaggtttaaaaattaggtggttgttttggtttggtgatagatattataattttagaagggtttatgtttttgtttattttttttttgatggagtataattgttttagtgtttattgaatttttatttaatttggttttgaggttttttttatgagaatagttataaattagttttgttttgttggagttttagggaatttgggtgtggagtttataatgtatttttatgggatgtttttttattttggaagatggtttaatgtttaagtgtttgatttgtaattaagcgttttttttataggaaatttgtttatattggaagatatttttgtggtttttgtttgatttgtgttcgtttatttttgttaaaattttattttttgggatagttttgtttgggtaagaagttaaatttgaaggtgttaggtaagatagaaagaagataatttaataaattatatgatttaaaattttaaaattcgtatattaaaatttaattttgttgtttttagtgtgattattttaagagatgattaagttatgaggatatgagttttaaagatgtgattaggatttttataaaaggatttaaggttgaagggaatgtttttttgtttttttattttttattatgtgatttatttttcgttatgtgaagatattgtaagatggtttttattagatgttagtattttgattttggattttttagtttttaggattgtgagaaaataaaattttggtttttgtaatttatttagtttgtggtgttttgttatagtaatataaatagttaaagataatattttagagggtaatgttttttagttagtattatttaattatttttttggattgattatatttaggtaatgggtatatattattattttattgttacgttttgttattaaatgggttttgtagttttgagtaatattaaatatagtattttatgagtgtttgaatggtaatggttttggaggtaatgtaggtgagaatagtaaatttatatttaaagtgtatattaattttagaaagaataaattattttttttttaaggtggaagattttgatatagttaatttgatattaattcgttggttgatttttttaagtaatggggttatatggtgagtttagtgttattttttattgttggtagggtggaatttagtaatgttattaagaagataatttttgttgattgtagttttggttgttgagtttatgtatattatttttttttttattagaggaggattatagttgatagttattattacgagagatgttttaggaataaattagaggaaatataacgatattttttagtatttttatgtatggtaatgattattagtagatattaaaataattaatttagtaaggatagggtaaataattgtatagatttttttggaatagttgtttttgttatttaaatagaaaaataaattatattaaatttagaggatgaggggaattaggagcggtttgtgacggagggagatgaatattagttatagttataatgataacgtagtggatattgttgtaaattttattaatcgttttgttttaattttttagattataattggttattttttttgatttttttatttgaagaaaaattaaagtatgttaatttttataggaaaaaaaatgagaggtattatattagagtatggtagtttggatttttgaattattagtttgagaagagttatttataaattattagtatttttttattgttatattagtgagttataaaattttatcgtattttagtttttatatatttttaagtttagttattgtagtagtttggtttattttaattaatataaaaagaagaaataataattgtagaaaaaattaaatagagaatataataattttaatggttttttttgagttagatttatttgaaatggtttttattttttgttttagtattattagagatgtaagatagaattttacgaaaatatttaagttggtggatgaggttaaattaggtaattaggttgtgtgtttggaatttaaattatattaagtattttttgttcgttttttttttattttttagagtagagtttgatttttatatattgttttataagtttatattaattaaattaatttttattattttgaaagtatttatggaaatattattttttttgaagttaaatacgagtattttgttttatgttgttttattgatatttagaattgtataaatttatattttttatatttgtgggaaattattatattgtagatgagtttaaaatattttgtgaattaaaatttattataataagttgtaaagaatagttttagtggaaagtgtgtatatgaaattagtaattaaatatttaaagtaagaagaataataattaagtgattataaaggaaatttttttaattatatgtttggtttttgtaggtggagaaggttgttttgttttaaggaagtggttattagattagagtgtaatttaatacgggatgttgttttaaaaaaaaaaaaaaaaaaaaaagatttatagaagttgtgtttgagttaaattattaagtattttttttgttagttaatgagaagaagtgaagtagtattatttgtttttggttgattgagttagtaagtttgttatagaaaaaaaaaaattatttaaaagagtaataaatatagaaaatattaaagcgtttattagttatgtgtgtaatttatagaaaagaatagaagaagtttattgaagaaaagtttgataaataaaagtattatatttttgaataagataatttgtgttaattttttaaataaaatatatagattttgtgatgttttaatttaaatattaataagatagttttgttaataaaatgtttttaattttttttaagaataataaatataaaaatagttattgataaaaatgagggggtgttgttttagtagatgtttataaataattataaagttaaataattaaaatatgtttttattgttattaaaaaaaaaagttaattgtggaataatattgattgtatagaagtcgatttaaatttatgttatgattaacgagatcgaaattgtatttatagtagtttttttttatttatgggggatatattgtaagattttatagtagatgtttgaagttacggattgtattaaattttatacgtattatgtttttatatatatataaatttatgataaagtgtaatttataaattatttatagttatagataaataaaaattaataataaaatagaataattttaataatatacggtaataaaatttaagtaaatggggtttttttttttttttaaaatgttttattgtattatatatttttatttttaaattgtgattaattatagataattgaaattatggaaagtgaaattatggataaggtggggttatcgtattttatttttagaagttattaaatttttgagaaaattttgggatgggatataaatatatttcgaagaagtttttagtgttatagtttatattttttatttttttgaggtatagaagaatttattttatttttttggagttaatttaggtttgtggggtaaaggattgtagttgatgaggattggaagttcgtgagatataaggggttaggaggtaagtttttgtaatatatttgaataatatggtatttatgtggaatggaagagaaagtagcgtagtggtgaggaaattttggtgggtgaagatatttttaggtgaaatttttagaagaaaaagttattttaagagaattttaaattattttttttggtattagaaatataattttaatttaatgttttttaagagattgtaataatggtttggagtgttttaaatggtgtattgggaagtttatttttgtttgttaaagaatgttatattaggattgtttttaagaatagaataagttattttgaatttatgttggataaatttttaaaaatgtagtatataataaaagtggattttttatttagtggaatgagggaaatttattaaaaatgatgttgggtttattggttatttagtaggaaaataaaaagagtttatatatatatatatatagagatgatattgagttagattaaaagtttaaatgtaaattaagaaggaatttaaaatatagaaaaagatatatgttaatatttattttattaaaaagtgttggaatgatttaaataaaataaaagaaagaaattatatagaaaaatattgttagattatatttttaaattattataaatataattataatttaaatgaaaaattaagagttaatatgtgaaatgtatattaatttttaagtattgcgttatattaaaagaaagtgtttatagtgtagtacgtgaattttaaatgagtaaaatatattgtattagttttttagttattgttatagaaaattagtataaatgtagaagtttagaataaaatttatttattatattagttttttaagttagaagtttaggtagagtttatttgggttttttgtttaggatgttataagatttaagttatagagatattgtaatttttatttgagtttggggtttttttttaagtttattgtttgttggtagaatttatttttacgtatgattgaggtttatagtaattataaatataggtgtatttaataaaatatttttaaagatatgaattaaaattgatataatatttaggtagaaagtaataaatttattatttatggtatgatattttaatatatgtttttaggttttttataagttaagaaggtaaaagtaggatataaaagatttaaataatataattagtaagtttaatttaatagatttaaatatattataaagttattgtttatgtttttatttatgtgttaggtggtagatttattagtgtttatttattagtgtttattatattaattatattatattatattaaaaaatattaaaaataataaattggttgggcgcggtggtttataattgtaattttagtattttgggaggtaaggtaggtgaattatttgaagttaggagtttgagattagtttggttaatatggtgaaattttgtttttattaaaaaaatataaaattattagggtatggtggtatgtattttagttttagttatttaggagattgaggtaggagaatcgtttgaatttgagaggtggaggttgtagtgagttgagatcgtattattgtattttagtttgggttattaagtaagattttgttttaaaaaaaattaaaattaaaattaaaattaatgtaataggtgttggtgaatttattagtttatatagatgagaatatagataataattttataatatatttaagtttattaggttaagtttattaattgtgttgtttagattttttatattttatttttgtttttttgatttataaagaattagaaatatatattaaaatattatattataaatggtagatttattgttttttatttaaatagtatattaattttgatttatgtttttgaggatattttattagatgtatttatatttatagttgttatgtttttttttttttttttttttttttttagataaagtttggttttatcgtttaggttggagtgtagtggtgtaatttcggtttattgtaatttatattttttggatttaagttatttttttatttttgttttttaagtagttgggattatagatacgcgttattatgtttagttaatttttgttttttgtagagataggttttagttatgttgtttagattggttttgaaattataagtttaagcggtttatttgttttagttttttaaagtgttgggattataggtgtgagtttttgtgtttagtttttgttttttttgattaggtgaatgtttattattatattagtttttttgttttacgatatttttttttttaaaatttgtttttgatattaataaataaatattattttttagaattagtttttgtataatatgttttttttatgttttatatttaatttttgaaatgatttttatgttttaggtatgtgttttgtaaatagtataatttgaatttatgtttttgtatttaatttgttagtttttgttttttggttataagtttagtttatttgtagttattaaaattaatgagatgtgtggattttatattataatattttttattttaattttttttatgattttattgatttttttattttgttgttatatgtttagaatttattttaacgtgtattaggtttgggtatgttgtttggaaggtggatgtattttgttttttattttgggatgcgtttttagtttttgttaaggttttggttgtttatttttggtattttttttatataggaaatatttagatttagttatttgtagattttgaaatattgttttggttcgttgtatatggtttgtttttggatttaatttaatattttatgttttcgtttagattatataattttagatttagtttgttaatatggattgtttgtatttttttagagaaatttttaaaagaaattattaatttttttaaaatattaatttgataggttttttttaaattaagtaatttgttgaaaaaaaaattatatgggtgttttaaattatattttttggataatttaatttgtaaatagtttgaatagttattttttatagttagaataataatattagttaatattagaggattaatttatgggtagttcgttttaaaatttattttgagagtttaaaagaaaatatattttgtagggaaataaagtatatttttttaagatttagttagtagtgaaggtattttaatagtatttaggatttttatatgtgaagaaaagtgaattaggtaataaatgagaagatttatatacgtttagtttttgtaggaggaaaggaattatttgggtatggaaaaggttattaggtaagattgtgattgaagagaaaggataatgataaaggggttttgtagaagttttggttagaagaaataattaatagtaatgaatatgtatttttttaattaatgagaagtatatgatgaggtagagttatttgtttttggtagtttaagttattaagaagtataaataaaatatatagtagtagggggagatgggaagggtgagagaatgtaggataaattattatttaaattgtcggtagaaatataaaattgtaaggaataaattttataaaaaaatatagtgttttaattataaaaatttattatgtagtataaagatataaatgatttaagaaatatgatatgtttagagatgggagtgtaattttgggtttgtatttttaaataaaatttatatgataatgagaatttaaatagtttagattattaaaattaaatttaatgaagttggtagttatattttggttatgtataagaatgtattttttttttaggaaatatatattgaagtatttaaggataaagagttttgatgagtgtaattttagaaaaaaaaatatataagtataaaatattatttttattgtaagttttttttaagtttatttttttatttttttttttgagtagaatagttgtttaggtgtagtggttgatttatttatttatttattatttttttaatatatatgttttattatattttaagttttagggtatatgtatataacgtgtaggtttgttatatatgtatatatgtgttatgttggtgtgttgtatttattaatttattatttatattaagtatattttttaatgttatttttttttttttttttttttttataataggtttttatgtgtgtgatgtttttttttttgtgtttaagtgtttttattgtttttttttataaattaaaatgaaaaaatttatatgaggttataaaaatattatttttataaaataaaaataaaatggaatgtaaaaagagattggatatattataatgtgaagattttttttttttgtgtatttatatatttaaaaaggaaattttttattttgtagttgggaagtagagttaagatgtaggagtaggaggggagttgagaattaataatttagtaaaaatgtttttagttaatttttatttgtatttaaaaaaaaaaaaaatttttttttttgagataaagttttgtttttgttttttaggttggagtgtaatggttcgatttcggtttattgtaattttcgttttttgggtttaagcgattttttttttttagtttttcgagtagttaggattataggtatttgttattatgtttggttaatttttgtatttttagtagagacggggttttattatgtggttaggttggtttcgaatttttgattttaggtgatttgtttttttcggttttttaaagtgttgggattataggtgtgagttattgtatttggttttaaaatttaaataattaggtaataaattatgatataattatatatagttttttaaaataatgttttagaaagatatttaatgataaaatagagttgtttgttatatgttaaatttaaaaggagttataaattagtatatttattgtgatttaaaatttttaaatttgtttatgtttttatttatatttatatttatagttttgaagtttttttaatattaattgttatttaaggttttaaaatataataaaagtgattttgtttttttttgtttttggttataattttaagacggtttgataagtttattgtgattgattttaaaaatatagatgttaaatgaaatttgtatgtggaattattggttttaatgatatatgtaattttggaagttgggtatttagttttatttaatttttttttttgtttatttttattaggtttgtaacgttttttatagtttaggtaataggtatatggtttttaattttatttgaattgtttttgggtttttttatgttgtttaggttggttttatatttttgagtttaagtaatttttttattttggttttttaaattgtttaagtattttttttgaatttagttgaataaaattggaaattaataagaagagaaatttgggaaattataaaaatatatggaaattaaataatatgtttttgaatgattagtgggttaatgaagaaattaagagggaaattgaaatatttattgaaataaatgataatgaaaatataatatattaaaatttatgggatatagtaaaagtagtaataaggaggaagtttatagttataagtgtttatattagaaaaggagaaattttaaattagtaatttaatgatgtattttaaaaattagaaaagtaagaggaaattaaagtaaaaattagttgaagaaaagaaaaagtaaagattagagtggaaataaatgaaattgaaaaaaatataaaagatttatgaaataaaaatttgtttttgtgaaaagttaaataaaattgataaatttttagtaagataaattaagaaaaaaagagagaagatttagataaataaaattataaatggaaaaggagatattataattgatattgtagaaatttaaaggattattagtggttattatgagtaattatatgttataaattggaaaatttagaagaaatggataaagttttagatatatgtaatttattaagattaaaataggaaataattttaaatttaaaaagattaataataagtaataagattaaagttataataaatagtttattagtaaataaattttaggatttgatgattttattgttgaatgttattaaatatttaaagaagaattaatattaattttatttaaattattttaaaaaatagagaaggagggaatatttttataagtattttatgagggaatatttttaaatttattttatgagtttagtattattttgatattaaaattagataaagatatataaaaaaaatttgtaggttaatatttttgatgaatattgatgtaaaaatttttaataaaatattagtaaattgaattaaataatatattagaaagattatttataataattaagtgggatttatcgttgggatgtaaggatggtttaatatatataaattaacgtgatatattatattaatataatgaagataaaaataaaatgtttattttaattgatgttgaaaaaagtatttgataaaatttaatattattttatgttaaaaatttttaaaaattggggatataaagaatatattttaatataataaaagttatatatgatagatttatagttagtattatattgaatggggaaaaattgaagttttttttttaagatttggaatatgataaggatgttattgttattattgttatttaatatagtattggaagttttagttagagtaattagataagagaaagatataaatggtatttaaatttaaaaggaagaagttaaattatttttgtttgtagaggatatgtttttatatttataaaaatttaaagattttataagaatattattagaattgataaatttaataaagttttaggatagaaaattagtatataaaattagtagaatttttatatgttaatagtgaataatgtgaaaaagaaatttaaaaagtaattttatttaaaatagttatatataaaatgaaatatttaggaattaatttgattaaggaagtgaaaaatttttataataaaagaaattgaggaataagaaatttttataataaaagaattttttataataaattttgtattttattataattttataataaaggaaattgagaataagaaatttttataatataagaaatttttttataataaaaaaaggaaatatgttttatgtttatggtttggaagaattaatagtgttaaaatgtttatattatttaaagtaatttatagatttaatataattattattaaataattaatgatattttttatagaaatggaaaaaaattttaaaattatatggaattataagatttagaatagttaaagttattttaagtaaaaagaataaaattagaagaattatattattgattttaaattatgttatagagttatggtaattaaaatagtatggtattggtataaaaatagacgtatagattagtggaatggattagagaatttagaagtaaatttataagtttatagtgtatttattttggataaaagtgttaaaaatatatattggggaaaagatagtttttgtaaaaagtgatgttgggaaaattggatatttatatgtagaagaataaaattagattcgttttttttattatatataaaaattaaattaaaatggattaaggatttaaatttaagattttaaattatgaaattattatacgaaaatattagggaaaatttttaggatattggtttaggtaaaaattttttgagtgatattttataaatataagtaattaaagtattaatggagaaatgggattatattaagttaaaaagtttttgaatataaaggatataattaataaagtgaagagataatttatagaatggaagaaaatatttttaaattatttatttgatgagggatgaataattagaatatataaggatttaaataattttataggaaaaaattaataatttaattaaaagttgggtaaaagatttgaatagatgttttttaaaataagatatataaatgataaataggtatatgaaaaggtgtttaatattattgattattagagaaatgtaaattaaaattataatgaggtattattttattttagttaaaaatggttgatatcgaaaagataggtaatagtaaatgttgggaaggatgtgaaataaagaatatttggatattattggtgggaacgtaaattagtataattattatggagaataatttggaggttttttaaaaaattaaaaattgagtttttatatgatttagtaattttattgttgggtatatattgaaaagaaaaaaaaagttagtatattaaagtatttattaatagttgaatggataaagaaaatgtggtatatatatataatggagtattatttagttataaaaaagaatgagatttagttatttgtaataataggtatggtagttttataagtgaaataagttaggtatagaaagataaatatcgtatgtttttagttatttgtaggatttaataattaaaatgattggatttatgaatatagagagtagaaggatgattattagaggttggaaaggtattgggggattagggagggagggatatggggatggttaatgggaaaaaattggaaagaatgaataagatttattatttgatagtataatagggtgattatagtaaatagtaattatatatttaaaataattttaagagtgtaattggattgtttgtaatttaatggataaatgtttgagggtatggatgtttattttttatgatttattgattttatattgtatttttttttttaaaatattttatgtatttgatatatatatatatttattatgtgtttataaatattagtaataaatataatttaaataaattagagtttatatattttatatatatattttttatattaaagtttaaatattttatataaatattttattatttgaaatttttggttatggaatatcgtatatttttatttaatttttttattaattttatttaaaaataaaaaaaattttttaatttttatatgtatagatttttgttagttatatttgtttatggatttaataaatagtaattgagtttattgattgtatttcggaaatttatatttatgatttttttttgtatgttaaataaattagagttatcgtgagagtatgttattatggggaatataagtgtttgagttagattgattaaaaagataaaatttgttattataataaagggttaatttatagaagttaaagaagatatgtaaaaggattgatttaaggatagtatattgtgtgttatataagaaattttttgtatattttttatttttaattttttttgtttgttatttttattattttatatatttttgtttttagatttatatagtattaaatggtttttgttaagatgtttttaatttattttttttttgttttagggtttttttttttagattagttagttgtttattgtatattattaaagtgttgttaggggatgagtttatattatagtatatgaatatagttatttttgatgtgagtttatggaggggatgagggagtggtgtaggtgatatataaaggatttgttggtttgtatattagatttaatattttttattataaggagataggatataagtttagtttatttgtttcgttttttgatagtatattttattttaaataagtataagtgtaaaaatttgtggtagtaaatttgttgtattttttttatgtttgatattaataatttaagagagattataataaaatatttttgattttgaaattagtttgttattgtttgtatggaaatttattattggtaagtttttgttttttagttttttttatttgtatttttatagtaagaattattatttaatattgtatatttgtatattatgtgattatttttttttttttgttagaattaaaatttataaaggtagggatatttttattttgttgattattttatttggaatagtatatagtatttagtaggagttaaataattatttgataaatgaatggatatattaattgatgaattttatgtttaaatttaggttgtttttgtttatataaatttttgttttttattagttatattttttgtttgttatatggagagaattattatttaggattttagttttgttttaaatatttggattttttcgtaattagggatttttaatttttttatttggtgttttgtttaataaatgaaagtgtttttgaatatttatatttggttttttaaaattatattagtttttagaataatgtttttagataatttattagtaattttttaaaggtgtgttttttaatttttatgaatgtgtaattatatttaaattgaaatgatataatgtttttgtgttaaatattgtagagaaagttgattatttttgtatacgttatttgttatttgagtttttttgtgaattgtcggtttatttattttttaatattgttattaggttatttaatttttttttattgatttgagtagtattttatttttttttttgtttaatatatgtatttaaagtatttaaatatattttatgattatgttgtttaatttttgtaatatatattaataaatatttatttgttatatttatttttaagaaatatataaaatgtaataatttgtattttttttatttttttttgtttttttaaatagtatttatgtattttaattttttaaagtttaaatataatatatttaagtgtaggttgtttttgtttttttaattttgtttggtatttttcgagatttgtaatcggtgattcgttgtttgttattaattttggtaagtttttatttggtttttataatattagatttttgcggtttttttagtatttagtttttgtagtgtagagtagttagtaatatttagtagtttcgttaggtatgtatattttttttagtagttttatagtagagagtgattattattattttatttttatgaattttataggaatagtttttttaatattttagaggaaggatttttgataagttttagagggtggattatagtaaattatcgttggagtagtagtttaataattatttttttgttatttagtgagttatggaagtgtttttttaataaggtttgattttatttttggaaagaaaattggagaaggtttttttttgggtgttttattttaatttaggtgatgggttaatatcgagtgttaatttgattgaattgaaagatgtaaagtattgtttttgggtgtgtttgtgagggtgttgttaaaggagattaatatttgagttagtggattgggagaggtaagatttatttttaatttgggtgggtattatttaattagttgttagtattattaggataaaagtaggtagaggatcgtagaaggattagattagcggttttttattttttattttttttttttgttaggggttttgagatttttaattatagattgaaggttgtattgttagtttttttatttttgaggtttggggatttggattggtttttttgttttttagattgtagacggtttattgtgggattttattttgtgattatgtgagttaatacgttttaataaatttttttttatatatatatttattatattagttttatttttttagataattttgattaatatattagggaagtagttattttgtattatattatattatgtattattatatttgttattgttatattatttagagttttttttatttttttttagttaattttttattatttagattttttgttaagattcgtatttttttatattgattttttttattttatattattgtgtgatttttttttttttttgattagatttatatttataaatttataaaattttatttaggtacgaatttagaataaaaattatttttagatatgtaaagattagaaaaatttgtttttagaatatttttttttggatattaatagacggtgtgtcgtagtaaaattaggtagttaaagtaagtaagaggaagatattagatatttgaaatattattttttattaaagaaaataatgaagagaattttaagatgatatttgtttagtagttttggaaattattttttttagattgaaattagagaattaagggtattaggaagtggataaatatgataagtatgattttataaattttatagtattgttgagatatttaaaatatttgaggatatgattaaaaagtagattatatatatgagggaaaagaaattgtaaatagaatttttataaaaattaaaagatgtttaataaaggaaatatatttttaataatgtgtatatacgtgtttaaaaaatatttggttataaataaattataaatattatcgggtttgaaaatattaaagataaattataaatgttagaagttgggatatgaaataaagaaaaaagtagagtaggaaagaatagggttagtagtagttttatttataaggagaaaatttaagagattttgaatataattgatagaataatagagtattgtgtttaaaaatatagggattggtcgggcgcggtggtttacgtttgtaattttagtattttgggaggttaaggcgggcggattacgaggttacgagatcgagattattttggttaatacggtgaaattttatttttattaaaaatataaaaaaaaaaattagtcgggtatggtggcgggcgtttgtagttttagttatttaggaggttgaggtatgagaatggcgtgaattcgggaggcggagtttgtagtgagttagtcgcgttattgtattttagtttgggggatagagcgagattttgttttaaaaataaataaataaataaataaataaataaataaataaataaataaaaaatgtagggattatttatagaggaattaaatatagtaagataataaaattataagaaagatgttagagatttaatttttggtggtttaaattatttggttttataataggaagttaatggatgtttaaattaatatttttatatataaaaatatacgtatattattattaaagttattgaattggggataatgatagtggaggaaaggaatggtatgaagggtttttgtttttattaaaatatatttttattgtttaatttttaaattatatattgatattttaataaatttaaaatagtaattgtaaagtaaaatattatttttattgaaatattaagaatgttgtagatggtggcggaatgtttaatgtgaaaaaggatagtggtttgtattagaatgatagtagtgaagtttgttttaagtatgtaattttatagtattaattttttatttgtgagagtatgtaaaagattgagttttttagtttttaaataaaagtagattttaatttttgttttagttatgtttttttgttttttaaatatttaaaattgtattttagattgtattatattttgagtatatggaaggaagagtacgggaaataagagtggttgtgttattatttttaaggaattttgattttttaaatttagatttgttaaggggtaaggaaaaaagggaaagcggtagtttttttgaatttttaaagtgtaatgtttttatttattggtgaatatgatttagttaatatttttatagttgtttatgtttttttaaaataagaattttgaattttttttagtagtatagaattcgtgttttttagtatagttttatattaaaagataaataaaatattaatttaaaatttttataatgtaatgagggtgtgggaatgataattttaaaatatgttatataaggttagttttaaaataacgttatcgttagtatttttattttttattatttatttattttttatagtttttgtttagattgttttttttttattgttttttttatttttttgtataaatttttttttttatattgttttttttgttaatatattgtttttttatgtgttaagttggtagtttttttttttttttattgttttttggtttttgatattttagataagaaatttgattttagtttggttttcgtttttttatgtgtaaattgtttattttttttttggaagttaatagattatttttattattattttattttttgattgtgtagtaaaaatttttatttttttagttatagaattatttgtatatttttatgattttatttgatttttttaaattgtatgaattttatttagttagagattaaagttttttttttttttagaaaaaaaaattttcgattttttattgtattttatattttttttattttttcggtatatttattatatagtagttggagatggttgtatagatagaatttttttaatatatttttataattttatgtgttttaaggtagttaaaataggaatttgattttttttgtatttttttttttatttttttattttttttaagatttagaattattatttgaatattttaattgataattgtttagttattttttatttgttttaaagagtgtttttttattatgtttaagaatgagagtaatttaaaatgaaattattttaatttgtttttttagagataagttttgttggttttttttttttttatgtattatgtgttggtaaaattttttagtttttttgtatgttttgtaatttttgtttaatattgatattttatataaattttgattttataatttttaggagtaagtgtttttgttgtttgttgtttgtgttagtgatttgtttgggttagtttttttaagtttgtttttttttagtatgtagtttatggtgtttttgttaagtttgtttaataatttttgtttttattattaagtttgattttttataattatttttggttattatagtttaatgttagtttatgattgatgaaagattttgtttaaataattgagttagtaaggtttttatattttgttattgaattgagtgggatgtgggaaatgtttttaaagtttcgggattttataggtatgttttaatttttattttttgtttttatatgtttttatatttagttaggttttttttgagtaggtttaattaagttgatgtagatagttttttatattattggggataaatgagattttagtaaggttatttttgattattttattttttggatttttttggtaaaatttttgattggtttgttattatgattttaagttagttgagatgttagttttttataattatttgttttgaggtttatgttgttttttataaaacgttaagacgttattttgagggtgtgtgtgtgtgtgtgtgtgtgtatgtatgtgcgtgagtttttttttaaaaaatgtgtgtgagttttttttggtaggttaagaagagttgtttaattttatggtttgtttttttatataggtagaaattttgtattataagttgaggtgaaggaagttggtgaaagtatattttggttaaaataatattgattttgttgtttttattaggatttagtttagatttttttaattaaatgttttttaatgttcgtattttttggttaatttttagagtttttaaatgattgtttgtggtaacgttgtttaatgtttttattgttttttagattcgttgaaatgttttgatgttaatatatgtggtatatttttatgtattttttacgtgaatttgaaaataagttgtatatagtatttggtatatatatatttaggataatatgtttttttgatgtattgatttttttttattatgaaaaatttatttttagtaatattttttatttgtaaagttttttttgtttgatattaatgtagttattttagtttttttgtttagtgtatatttttttatttttatatttttaatttgtgtttttatatttaaaatgtattttttatggatagtgtatggttaaaagttttgtttatttatttagtttagaaatatgtatttaatgtaattattgaagtattggatttaagtttatttttttgttgttttttgtttttggtttatttgtttttttttttttatttttttttatttgttttttttagtatattttttttttttttaatggtaattgagtagaaagatgttagaatttaggtttttaagatttgtggaattttaaaataatttttattttattttatttgaggtagagttttgttttgttgtttaaattggagtgtagtggcgtattatttgtagaatttgagtggaaaattttaaataagaatattatagaggagagtttaaaattttgtatttgaaagaaatttgtatgtagaataggggtttttttttgagtttttatggtttttggggatttttttttttaatagtaattaattttttcggtattaaattttaattttcgttttttttttttggtaagattgtatttttttgtttgagttttgttttattatttattgttttagattgaaaagtatttttaggggaaatttatagtaaacgttgaatttatttagttatttttttttttttaatatttattttttgatgtattttgtatgttttaaaagatttttaatgattgtaaatttttaagttatttttatagattttataatttttgtttttagaaaggttagacgtagatatatggtttttaatataagtaagtagttatagaaataaatgtatagatgtttatgtgtatgtttataaataggattttagatttttgatatttttatagtaatgagtatatttaatatatagattttgatttagttttttaattagatttttttaaaagaatttagagttatgatagattttagagtttgagaaaaaaaataaaagatgattatagaaagtaaggatatttaagaatggtggatacggttaggcgcggtggtttatgtttgtaattttagtatttggggaggtcgaggtaggcggattacgaggttaggagatcgataatattttggttaatacggtgaaatttcgtttttattaaaaaatataaaaaaaaaattgtcgggcgtggtagcgggcgtttgtagttttagttatttgggaggttgaggtaggataatggggtgaattttgaaggcggagtttgtcgtgagtcgagatcgcgttattgtattttagtttgggcgatagaagcgagatttttttttaaaaaaaaaaaaaaaaaaaaaaaaaaaaaagaatgatggatacgtgttaggtgttagagataagaatatgtttaaagaatggtagatatatgttttttatatagataggtaaaaaataattagaagaaagaatgtatattataaatatttaaattataataaatttagtttgattatattaataataaaaaaaatttttattaaaaatatgttttattaggaataaaaataaaatttgagttataatgatggagaaattataagaagaatataatttttttaaatatgtatgtatttaataatatgatttaaaaataaatgatataaaaattgatagaaatgaaaatatagataaatttgtaatcgtaattagagatttttaaatgttttttttaataattggtaaaagaaatgaataaaaaattaggaaaatatattaaatagtggaatagtattaataattaaattaatttaattgatatttataagatattagattagaatatgtaatggtaaaatatatattattttaggtgtatatgaaatatttattaagatgaataatatattggattataaatttagttttaagaaatttaatagtatgtaaattgggtagggtatgttttttgattaaaaaagataaaaataaaaatattttaattaaattagaaagtagtattaaattgataatttggaaattttttaaatatatagaaattaattaatatattattaaataagttataggtttaagaggaaattataaagaaaattagagaatattttaagtgaatgattatgaagtttattatattaaaatgtatgagataaagttgaaagagtgtttgaagggaaattagtttttttaaatgtatatattagaattgaagagaagtttaaaattaatggtgtgagtttttattttaagaaggtagaaaaaggaaagtaaattaaatttaaagaagatagaaggtagaaagaaggaattaaaaagtaaagatgtggaattaatttaaatgtttattagtgatagattggataaagaaaatgtggtatatatttattatggaatattatgtagttataaaaaagaatgagtttatgtttttcgtagggatatggacgaagttggaaattattatttttagtaaattaatataggaatagaaaattaaatatcgtatgtttttatttataagtgggagttgaataatgagagtatatatttaagttttatatgttttaataatgagaatatataaggaggggaatattataaatcggggttagttggggagtggagggaaagagaagggtgagtattggataaatatttaatgtatgtaggttttaaaatttagatgatggattgataggtgtagtaaattattatagcgtatgtatatttatgtaataaatttgtatgttgagtatatgtattttagaatttaaagtaaaataaataaaaaaaagaaatgattaaatgtggtaaagataaataaaagaaagaaggaattaataaaaatgaaattagataataatgaaatagaaaattagtaaatagaaaaattaataaagttgggttgggtgtggtggtttatatttgtaattttagtattttgggaggatgaagagggacgattatttgaagtaatttttttgttttagtttttttaagtagttgggattataggtatgcgttattatgttcggttaattttgtatttttagtagagacggggtttttttatgttggttaggttggtttcgaattttcgattttaggtgatttgtttattttggttttttaaagtgttgggattatagggatgagttattatgatgggtttaaaatgaaattttaattggtaagaaggtagatggtgagaattgttgatttaataataatatgaagtttatgaaagtttgtggttataaagaatgttgagttatagattttattagagataataaaggggtttcgaaatattttgagatttgtagaagagtgaaatagatttttaagaggatcgtggtaagtattgtttgaattatttgtttttggttattttttattaggttgtgatgggtttaagtaattgaaatttttgatgtaagtaatatagacgtatttaggagagatatttttaaagggtttaggggaagaatatttgttgggggttaatgtttttttaattttggggtcggtgttaaattggagtgatagaatgtttagaaaaaaattagcgaagaagaatatttttgaggtaataaataggagtatttcgtattggaggttttttaggataattgttgtgtggtggttttggaatatattttttcggataatattacgttattattgatgtatagttagtgtgttggttagtaggtttaaagttaaaagagtggtagaattaaagtgaaattatatggttaggttagatgttattaggagagtcgagagagtttttgttagtggttaagggttaggtatagttatatggtaggtaagtgtttggtgggttattatgtattattatgtaaataaagatttattaatagtgtgaagatataagtttgaataagagtaatagtaaattcgagaatagttagtagaattagaataataagagatattgaagttgcggagatattaataattgataatattagtattgtattgcgattgtggtcggcgattattttatttttagggttaattaggttaataaattattttaaatttattataattttttataatgttttaagttttaaggtttcggtattggagggtttataattaaatatattttttttttataataagttttattttgttttttagtttttgaaggaaatttttttgtaggattttttatatttaattaatgtaattgtattattattattaaatatttttttaattattagattaattaagttgattattaagttattatttgaagtaaatggaacgtttttgtatttggtttgttttatagtttattttttaattaatgtttttgaattaatttgtgttgtttttggtttttatttttttttatggtttaatattaatgatgtaatattcgattatagtaaacgtgtaaaaaataatttttgttatatttttattatagtggatgtttttttggttttttttttgtttatttggagtaaggaattgtaggaaagaaataatatttaatttttgatatatttattttttttttatatttttgtttgtatttacgatgaaggtttgttttttttgtgtggtattaatatatatttttgtttttttattaatcggatcggaatttgttttttagtttatttttttttttttattggattagttttttttaattaatttttgtttattttatttatttaatatgttaggaaaaggagagttatttatattattttttaatggttgttttgggtataatttttggatttagagagggagtaggtggattagttatatattttaaggttttttcgatagaattatagggatttttagaagatatagtttgaagttttgtaagagtttaagattaattagattttttagttggtgtagttttttagaatagatagagattagattttataatggttgaaagagagggtatttgtttttaattgggtgaggaaagttgtttttattttaattagtcgggcgtagtaagagatgttgtcgtaaaatttaaagaaagggttgaaaagttaagggaatattaatataattaaatagatttttagtttgggaataaaattatagtatgagttattttatttttgggtttttttttaatgatatgtttaggattaatttttttattttgtttaattaattttttttaaagatttttaattaataggattatggttattttatagataattatttaaaaatatttatagacggtattatttttatagttaatttgagattagaaaattttttatattttttttagtaggaattagttagaaagaatatattatttttatttttttataattataggatttggattgatagagtaggagtatcgttattttggatatgtattattattttaaagttttttttgattaaaagttatttaaatttaatttaaagggtattagtttaatggttaatggtagtatgattttaaattataaatgatatttttgattagaaatattttaattttgagataaatttttttttaattagagatatattagttttaagataattttttttttgatcggagagatgttaaatttaagataattttttttttaattagagatattttaattttataataaattttttttttatatagaaatatttaagtttttcgttttaaatttttaaatatttttagtttgtaagagagagggtttttgattgaaattagttagaagtttttttaggtttattttttaaaataaatttgtttttgattgttgagttattttttgtgttttttttttttttttttaattttttttttttttatgtatttatgttttatatatattttatatatatagcgtttgaaggtaatttttttttttaggttgtttttttttttttattttttttatttttttttaattatattttaagttttagggtatatgtgtatattgtgtaggttagttatatatgtatatatgtgttatgttggtgcgttgtatttattaatgtgttatttagtattaggtatattttttaatgttattttttttttttttttcgattttattatagtttttagagtgtgatatttttttttttgtgtttatgtgattttattgtttaatttttatttatgagtgagaatatacggtgtttggttttttgtttttgcgatagtttattgagaatgatggtttttaattttatttaggtttttataaaggatatgaatttattattttttatggttgtataatattgtgtgtattattatttggattaatataaatgagaaaggagagatagagatcgtgaattaggtaaatggatgtgtattatttggtggtagtaaaaatataatttaaatttatttcgtgtttaagtttataaattatgattattgataatattataatttaggttgtttttattttgtggaattttgtagattaattaagattttattaatatagtattttatatttatatgtaatgtaattttttagtaattataaagtaggttgttgagaggatttatgatgtaatatatataaaatatttagatttattttatggtatatataggttttaaataatgttatttaagggtatgatttatataatttgtatttgggattttagttttaatgtttaaattttgggaattaagtgtggtttatattgaatattatttttgtttaaatttgttagttttatatatttttatattaattttaagtattaagttttttttttattttttttttttttttttttttttttttttttttttttttttttttttttttttttttttttttttttttttttttttttttttttttttttttttttttttttttttttttttttttttttttttttttttttttaattgtgggaaaatataaataaattaaaatttattatttttatttttttaagtgtatagtttagtggtattaaatatatttatattattgtatataataattattatagatttttagaatttttttttattttaaattggaattttgtaattataaataattttttatttttttttttttttagttattagtgattattattttattttttgtttttgtttgattatttaaggtggttttataaggtagaattatataatatttgttttttttgtgattggtttattttattttatataatgtttttatattttatttgagttatagtatatttttagaattttttttttttttaagattgaataatattttattgtatgtttatattatattttgtttttttaggtatttattgatggagatttgtttgtttgtttgttttattttttggttattattaacgtttgtgttatgaatatgggtatattaatgtatgtttaagtttttttttttagtttttttgggtatatgattagaagtggaattatggtattatatggtaattgtatgtttaaagtttttgagttatgattttatttttttttataatagttgtattattttatattttcgttagtaaggtataagggttttaatttttttatatttatagtaatatttatatttttttttttttttttgaataatagttattttaacgtgtgtatgtataattatatataaaaaaagtggtgaatttcgtaaaagtaatatttattaaaggaaagaaataaatttaatatattattttatttatataaaatttaagattatatatatatttttaaaaagtaaataattagtataaaattagagtaatgtttttttttaagggaaagatggtaggtagaaggtgtatatatagggtttttgggaagttggataagttttttagtttgtgttattaattatttattaaattttatatatatgtttatgtaattttgtgtttaagttatgtgttagtttaaaagaaacgttattattaaatttttaattatgaaaattttattttttaattatgagttgaagaatagtaatataagttgttgattgtttttttggatagaaatttaggataagaaatataaattgaatttattttgagaaatttattttttaagatatatgaggtatttaaatttaagagaggtgaagattatttttattaatataaatttaagatttaattttttttaaagatgtggattttagggaaaaaattaattgttgttaagaattatggtgattttgttttatagtaattttattaaaggatttagtttaagtttaagattaaaaggttatatgaggtatatgtgtatgagtaggatagagaaaaatagtaaaaatatttttttttgaattatgggattttttgtgaagaagttttatggtggtaaagttttaataagaatattattagtgatgttttgtggtaagttatatatattaaagttagtaaagattggaaattgaatgtggtaggttttttgtgtatgatataaagtaagataatgaggaagaagtaggtattttatggaaaaataaaatattttgagaagaaaataaagagagaggggaagtgaattattggtatagtgagttatagaaagtggtaaaatagagaattaaaaataataaataaggtttttgtattttgtagtttagaaggatatgtttggtttagattttatttttgtagataagtattgaaaaaggtatgaatgtgaaagtgtggttttgagtagtttaattaaaattgtttttttttgaattttatattgattaaaataaatttggatttaagtaaattgttttatattgtgttgtgaaattgttaaagataaaaattcgtatatttgtatagagtttttattatgaatggagtttgtaggattggaagttgttttgggtgaattagcgagtgagtggtgagtgaatgaaggtttaggtttttattgtatattattaagtatttcgtaaatattgtatatagtttatattaaattatagaaaaaaagtttttttttaatgatgaattaattttagtttatgtattttttttattttataaattttttgaattattataaattttttgatttatgtaataatatttagtttaaaatataaatatatttagagttatataaatgtattttttttttttatatttttattgtttaaatttttttttaaattttttattttttatatttttttttttttaaatagttaaggtttaaatatatacgttagtttaggtttatatagggttaggattattaatattattgttttgtatttttttattttgttttattggaaggtttttaggggtaataatataaatatatatggagttgttattttttatgataataatgttttttttaggaatatttttttaaggatttatttgaggttgttttatggttaattttttttttataaggaagagtatattttaaaataataataaaatgtatttagttggtgtagtttttcgaaataaagattagattttataatggttgataaaagagggcgtttatatagtgtatagtatagtatatatatatattagtatcgtagttatttgttgttattattgagtattgtgtattgtatataattgtattgttatatttttatgtgattggtagtataggagatttgtttgcgttagtattattataaatttgtgagtaatgtattatgttataatgttataatggttattatatagggataggaaatttttagttttattataatttcgtgatgattaatttatatatgttttttttttgattgaattgtcgttatgtggtgtatgattgtattatattgtgagttttgggttttattaaaattttaggagaaggttgaattttttgttttagtaagaattaattttattaagtttagaatgtaagttgtatttcgttttttgtgcgtcgtagttttaacgttattatagtttttaaagattttgttatgttgttcgtgtttgttttgtgtttgggttttttagttattagtttggtattaggattgtgatatttgtattatagtttagtttttaatggttttgatatgttggtgtgaaattgtttttttcgtgcggtttggggagtttaagattttgagagttatgatggtttatgtatagaattagggattttttttttttatttttttttttgagattttttttatattttttaggttttataggttttttttatcggtttttttggttagaaaggttggttttttttaaagtattgttatgtgattttgtataattggggttttttttgaggtaaagtgggaagagaaaattgagtaaaaatataaagggaaatattttatattttttaggttatagggttttttttttttagtttttttgggatgttttttttagagtttttgatggttttattatagtagttttagtatagttttttgattttgattatatttagggaagaattagaagtgaaaaaagaagtaaagttttaaaaaaggaatattgttttatatattttttggagattttttttgtaatttgtatagaaagaggaggtgttttttggagttttttttttttgtttttattgtatattatatgtttggagttatttttaagttaaagttaggagataaaagaggaaaaattttaggaatttatttttttattattatttttttaagttttgatttttttttttaatatttatgttattttgtattttttaaggtttatagatagttgttttttatattttgtttgatgttttttattataattagtgtaagatatagattatagtgggtttattttaatttggtcgttatagaaagattttttttagttttgttgttgaaggatgtttttttgattttagaattttaggtttgtgttaggggtagaagtttttttagcgtattttaaggttttattttatttttttttagattttaaagtttttattgaaagttagttttaattttttttgttttttttttttaaagataagatattttcgtttttggttgatttaaatattttttttttatttttggttttgagtaatttattattttttttttatatatggttttattttattagtttatgattgaggttgataagttttttgtatttgtgttttgatatcgttaattagttttggaaaattttttgttattatttttttgttttttttgttgtattttttattttttatttttatgtataattgtaagtatatttgattattagataatgtttatatgtttttgatgttgatattttttttttttattttattttgtgttatgttttagagtagatgttttttattaaattgtttttaagttaattattattgtatttgtttgtgattagtttgttgttaaatttatttattaagttttaattttagatgatgtattttgattttttttatttagatttcgtatttaaaagattttatatttatatttttttttagattgtaaatttttttttttattatatattttttgatatttatgattatatggttaaatagagttaatttaaagtttttttgtgttaagtgattaagtttagaaagagttttgtgttttttaaaaaattgttggtgaggttgttggtatttagagtattatgggattaaatatataaaaagtttataacgttttttatttagttgtattggtaaaattgttattagtttggattgaaagagattgaggttgtttaaaatgtaaaagggtaatggatttgtaattttttatgtaaaagaaataggttgagaaagttgtttaaagtgtcgattattttatgtgttttttaaaggtggttaaggagggaaatagaaaaggaagtattttttaaagggaagagtatagaattttgaggataggtagattaatgagaaatttttaaggaaaggagttaggggttaattaaggaatattgtttatttttagaggggatgtgtaaggtagtatttgtttagtggaattttagaattgttagggattagtgattgtttagttttttatttttttcgtttttgaatgggtatgtttattattattattttgatttagttttagtattgtgtattgagtgttgatggaaagataattttgtttttattgttgtggtttgtatgttttagaattaacgaaagaggaggtcgggcgtagtggtttaggtttgtaattttagtattttgggaggttgaggtaggtggattatgaggttaggagatggagattattttggttaatacggtgaaatcgtgtgtttttattaaaaatataaaaaataagttaggtatggtggtatacgtttgtaattttagttatttaggaggttgaggtaggagaattatttgaatttagaaggtagaggttgtggtgagtcgaggtggcgttattgtatttagtcgatagagtgagattttattttaaaataaataaaaaaaaaaaaaaagaaagaaaaagaaagaaagaaagaaagaaaaagaaagaaagagaaagaaagaggaaagaaatatatgaaaaggtggtttattagttacggtatatttattttagagaaaataaatttgagaggcgttttttggtcgagttaggttagaggtacgtttttttatagattaagttttttaaggatttagagtgggagagtttatttaaggtttggattgtttttgtgtttttttgttgtgtttatttaggagggagagttgtgtgtttgtttttatatattttttttgtagttgtaggtatatttttagagtttgtttttagtttttttattttagtgtatttgaagggaaaggaatgtgtttattaaggtttattgttttagggtttattgtatgagggtgaagtttggtagttatttaggggattttttttttatttttttttgtgtttaaatttttttatttgtgttttattgtttgttttttttggttatttgtagttagaagagaagtgatttttttgaaatgtatgaggttagaaagggagttggaatttaaagtggcggtgtttgttcgagatgatagggttttagttttattagtatgtttttggattaaggagaattgtattttgatttgtattttgattgtgagattttgaatttgatggttgatgttatgattgtatgagatttttggtgattttagattaggggtaagtatattttttatattggaagaatatgaaaaattgtagtaataaaagtggattgtaatagattatgatgatgattttaatttattatttttttttatatttacgttttttgtaatttaattttattatgtttttttattatggatgggtgatttgaattgttttttaatattaggtttaattatgtgtttttttatagttaaggagttattagtaaatgttatatattttgggttttgaaattggcgtatgtattggagttaatattttgtttgtttttgtattgttataaggatatttttaggtaagtttatcggttttaagaagaggatgagaggtatgtgaagaagagtttattttggatatataagtgagtttggttaaggttagtagtgttatttagttgatttagatatataagtatattgttatttgttattggtgatttgtgttgtttgtaatgtagtattgttgtgataatagatgattaatatattaattaatgtattttttaaaatgttgtttatgatttgtttttagattattaaaatatacgttttatgaggataggaataattttttttgttttatttttgttgtatttttagtatttttaatattttttggtataaagtagtttttttaaatatatatatatatatatatatatatatgtatatatatatatttaaatagagttttattttgttgtttaggttggagtgtagtggtgtaattttattttattgtaatttttgttttttaggtttaagtgatttttttgttttagttttttaagtagttgggattataagtatgtattataatatttggttaatttttgtatttttagtagagttagggttttattatgttggttaggttggtttcgaatttttgattttaggtgatttgttcgttttagttttttaaagtgttgggattataggtgtgagttattatgtttagttaaaaatatttttaataaataatgaattttaaattttaaaaatttttttatgaaaagattttttggagagtttaatgtatatatatattttagagtttggataatttagtagattggtatttggggtatgttgaagaatgttgaagtttaagagttaatttagttatatgtttttgaaatagaaaaaatttttttgttttttttgtagggagtgcgatgtggtttttttttttagtgttcgttgtttagatttttaggggagtatatagatggttaggttgtgaggttttgattttagagtagtgtttgggggtgaatgtttatagtttttgaagttttagtgggtgtgtttttttgttgatgtgtttttttttaacgtttagtagtttttgtttttgttttgttagggttttaggtttttataggtataggatgggatatggtaggttagagtggttttgggaaatgtaatatttggatagggaatgtttgtttttatttaggttcgtggggatggagttttagttagggattatatttttttttatttagtatttttgttttttgtttttttattatttaaagggattatatttttgtttttttagtatttacgtattatttttaagtagagaaaagaataagtagttatattaggatttgtttgatttttagaaggaaagagatttatttttttttggtaatcgatatagattaaaagtaagggaaaggtttggggtttgtttgttttagtattttaaggtagtttttaagagaaatagattatagaagaaagaggttgttagtattttagagtgtttagtgattgagaattttatgagaatggagatgtagtagtttttatcgggttttgaattaggggagtgtggatttttaaagaatttatgaaaatgtttataatagagtttttttatgtatttgttttttttatagtatttaatttaagtatatgaaatattaggtaagtaaaaattgtttttttttgttttttatgttttaattcgtaggggtttgaaattatattacgtagaagaattagaagtataagttgtagaaataaaagaagttaattttgtatttttattgtttgtgagttttttatttgtaatatttttgaataagtaagagtgtgaggttttcgttttgaataaaatatagaaatttgattattgaatgggattaattgaatatttttttttttttatttaaatattattagagaggttatgaagtttttttgaatgtttatttaaggtaaggaattggttaattttaaagaatatattgaaaagaaaaaatggtaataggattaaattaaatacgttttattatattgtattagtttagatgtttaatatatgtttttttaataaagaaaagtttatttggttaatgatttttaggttgtataagaagtatggtattagtatttgtatttgatgaggattttagggtgtttttatttgtggtagaagaaggggagttagtatgtgtagatgttatatggcgagagataaaggaaaggaaagaggaggaaggttttaggttttttttaataatcggattttataggaattaatagtgtgagaagatgtttaatatattttaataagaaagatatttttaataaattgtcgtgagataattgttatattggtttgtttttacgtttttaataaagatatatttaatattgggtaatttataaaggaaagaggtttaatggatatatagttttatatggttggggaggttttataattatggtgggaggtaaaagagaagtaaaagtatgttttatatgatagtaggtaagagagagtttgtttaggggaatttttatttataaaattattagattttgtgagattattataagaatagtataggaaagttttatttttttgatttaattatttttgattggattttttttaagttacgtgggaattatgggaattatagtttaagatgagatttgggtgcggatatagttaaattatataaattgtagtttatttttttattatgatttatattataaagaaaaagagttgttttaataatttgtattttattttatatttataaggaaaatattttttttttggttaattgtttatgtttaaataaaaattttataattttataaggttttgttttttatatttgatgttgaaattaagaagttttttaaaaaataatttttttttttttttttttttttttgagacggagtttcgttttgtcgtttaggttggagtgtagtggcgcgatttcggtttattgtaagttttatttttcgggtttatattatttttttgttttagtttttcgagtagttggaattataggtgttcgttattacgttcggttaattttttgtatttttagtagagacggggttttatcgtgttagttaggatggtttcgattttttgatttcgtgattcgttcgtttcggttttttaaagtgttgggattataggcgtgagttatcgcgttcggtttaaaaaataatttttttttaaaattttgagtatagttttttattaggattgttaatatgatgaaacgaagattttttttatttaaagaatatattaaagtgtttattattaattatttttttaatgtaaagatttttgttttttatggtaatttgatttgttttggtttggtttttatttgatattgaggatgaagggaaattagagtagaattgtttatttatattattttaaatttttaattatgaaaggaaaaggtttgggatttcgtttgtaaagttaagtgtgtgtgtgtatgtgtgtgtgtgtgtgtgtttgaaaggggtttatttatattgggttttattttggtatggaggtaatttttatttaagtgtggttggttcgaaggataagtagggatgataagaggttgtttggtattaaggattaggtagagttggggttgagttatggttgtgtggaaagttaggattatggttggggatggaaggaggttaaatttgttatataatttgaaattagggtatgatagtgtggtaaagaagagatagagtttgaaatagaagtagttatttatttagtatgtgtattaattattatatgattagtttagtgttatttgattaaaatggagattaatgtattaatgattaatttatatgggttttgtttatattattatttaatataggttatttaataatttgagttagagagataatgttttatgagataaataaggttgttgttattaaagaaattaaataaatgaagaatgattattatataataatgagtgttttttgaggagaaaaaataaaagtaattgggagtgatttgagggaatttttttaggttgagtgattagaaattgttattttagaaatattttatttgaaaagagatttgaatgttaagaaaaagttagttatttaaaatttatagtaaattattttatatagtaagaatataagtgaaaattgttaatgaagaaataaatttgtatgttagagaaatagatagggagttagtgtattgaagtttattgaacggtaaaagaatgttatattgtggaataagtaaaattatggagaaaaatatattgtagaagagttattcggattgttttatgattttttggaaattttttggttatagtcgattgaaagggatattgtggtaatgttggtttttttagattgaaattaaagtttatggtttgaaagattaaaaagagataatgagtttattatttattaaagaaagtaagttataaaaatagtttaaaatatggaataagcgataggtatgttaattatttttttttggtattggattaataaaaagttgttgttggtggtggtggtatattaagtagaaaaggtttattgggtttaaaaattattgatatgtggtcgggcgcggtggtttacgtttgtaattttagtattttgggaggtcgaggcgggcggattataaggttaggagatcgagattattttggttaatatagtgaaatttcgtttttattaaaaatataaaaaattagttgggcgaggtggcgggcgtttgtagttttagttattcgggaggttgaggtaggagaatggcgtgaatttcgggggcggagtttgtagtgagtcgagatcgcgttattgtatttcggtttgggcgatagcgagatttcgttttaaaaaaaaaaaaaaaaaaaaaaaaaaaaattattgatatgtatattatttattttgtaatgaggttattttttttagtttttattgtagaggattggatttggaaattgtgttattaagaaaaatgtaggagaaggtttgagtgtttttatttttatatgtagtggattgttatgtaatatattttttaattttttttagtgtattttttttgtattgtaaaagatgtgtaattgaaaagaatattttttggatagtatttgatgttatttagatttagttaattagaggtattttggtaaattttggatatgttgagggtttttttttttttttttttttttatttgaaaaggtattagtgtaggggtgttttatttttttgttagaattaggagagatttttatgtttgataattgattttatggatataaagaggtagtatgtagcgtgtttgttattggtgtagattgtagtaggtgatcgtgggggtttattgaatggaggagttttttaaatatggttgttttgggtagtatgagtttttgattgtagaagaggaggtggtttttttggttgtttgatttagttttttttattgttttgatgattttttaagttatattaaggtttgtaataaatttttttttatttaaaattaattaaggtaaattttgttttttgtagttatttaatattttatgtttattatttgaatagatagaataaaaaatttttttgatggtaatttaatatttttttttgtaataaataaataaattgtgatttgaatttttattttagttggtattatatgtaggaatatggattttggggtcgtgtttgtttttagtgattatttattattttgattagagggagtttttagtatttttgtttttaaggttaagatacgaagattttttttttaattgtttttgaaattgattttttttttgggaattttcgtttagtatattgagttttaatgggtaattgattgtttttttatttttttatggagaattagaatagaatggaagatttgagtaatattaaagagttagttatatttgaaatttatataaaatttatattttgagtaatgaataggatattatagagaatttatttttttttgatatgttttttttggtttatagaaattagatagtaattatttttttttgtttttggtattaaaaatttaagataaagttttagaataagaattttaatattggtatatttggtgggtttaaaaataaaataaaaatggtagttataatatttattaggtgtttattgtatgttttttttaatgtagtatagatagaaaaagaagaagttataaagtttgaagagaaagaaaagttattatttttagtagatgttataattatgaataaaggaaatatataaaataattttaaaggtagattatgtaattgataagagtgtgtagtgagattgttgatttgaaggttttgtatgataaagtattgtatttttgtagaaaatataatattgaagatttttaaaatattattttaaataatattattttatatttataaaagggaaatgtggaaaatataaaagttaatattgaataataatgatggaattttgttttatgaaaatattattattattattattatatatgtgttaatggataaaaatagttaagaaaattttgtaaaggaaaattaagaatgaggaagaggatattttagatattaaagtatattataaaataataatgtgtgatattggtttaggagtattaaaatatttttaagaaaggacgaaagatttgagagataggtgaatttttgaagaaaaagttattatgtagttaattagtaaatatttattaagtatttattgtatattaggtagtgttttaggtatttagaatattgttgaataaaatagataaggttttttttttgattttatattttaaataaatagatgaataaatgatagataataattgtagattaatagattgatagagattagaaaaataagagattatatatttatattatgattaattaagtgaaaataaaatgattaggtagaatagataattttattgaattgatttgttggtttaattggtatattttatttttttagtaaataagttgatgttcgtgatatgttaatagtttatagttgttttttggtttttttgtatatttttgtttttattagttgagtttaatgtttgttaaaagttgttggcgtttgtttataaatttgtttatttttattgatttgttattgtaattatatatttaaataaagtaaatattttattatgaattaagaatgaattttaaaagggaaattttaagtttttaaattattaaatgttttggaaataataacgataagttgtttaataaaatattattaaattggatataggtaaaataatttttaaaatggagaaaatgaggtgaaaatttaaagggtttttaaatttagaattttttgtaatgttttattttaaatttttataaattttttaaaaaattaaaatttgatacgatagaaagtttgttatgggtgttgtttagttatttaagataatttaaaattttaaataatagatatattttttaagtgaaggtttggttttatgttaatatattgttaaataaatatatatgtatatatgtatttattttagttaaaataaaatgtttattatattatatatttataaattattttaattatttttaattgtaattgatttttaaaaataattgtttaattattaggttttataattgaatatatggtttttataaatgtgataattgatatgaagaaaattaatatttaattaagaataattgagtggtaattttaaatttggttattaggaaaatttttttttaggttatatttaagttgaaataaaaataatataaaggagttagaaagaagataatgtatatgtaataattaggaaaagaaatattttaggtagaaggaattattttaacgtagattaaatttgaaatgttaaaaaagtagaaatgaggttagtggtagagatggttggatttttattaaaatttgtgtatttttttttttgttgtttagtgatattgtttagaaatggtagtttaagtaaggattttatttttacgtatttttatttaggtggggttatattattagtttttattatgaaatgtgattgaaagtgaagtgtgttgttggtatattaaggaattaagtaataagtgtgttttttttatttttttttttttgttttttattattggaagtagagagtagaagtttagtaaaagagtagaattatagtatgtgaagggtttgggtttttgagttattatgtggagaaaaatatttagattattaataatttggtaatggattgttatgtgaataagaagagaatgtttatttagttagttttttgaaatttttatttttatttcgtatagtagttggtgttatttaaattaataaaatgagatagttaaaaggtagatagtgaatttagtagtatgggtaaagagtagattatagaagattttattagttaggtagaagatttgattagttaggtaagaaatttaggtttaattttagatgttataagaaaatatgtgaggtgtttaattatgatatagatgtggtagagattaagttttataaatatttttagtagttgtgtggaaaatgaattgtaggaattaagaaggaagtagggggatggggtaggaggttattttaataatttaggaggaatacggtagtatgttaaagttaagtggttataaagaagatgaataaaatggattaagttgagaaatattttattatttaattgatagaatttattaattggttgaatgtggaagttgagaatgtgataaattaaggataattttttttttttttgatgtttttttgttattttttttattaaataaaattagtgatgtaaattaaaaagtgtggaagaagttaaaggtaagatatttttatatatttgaagttatagataggtaggatttagtattttataattgtttaatttgattatttaaattttaaataggggtaggattttaagagttaagttgttattgattttttattagaaaattttaataatagagtattttggggatttatatttgaaaacgtttataataaaagagatttatatggatatgataaattttaaatgatattgatatttgttttaattttgttaattatattttttttgatgattttttttaaaatagatagtagtagtagatatatgttggggattgtgtgtgaggagtgttttgttatataattttagttgtttttgtatttgggttttagtgattcgttttttttttataagagattatatttttatgaaatagtagcgggtaatagattttatttagcgttttaatattttattatattgggtagaagtgatcgttgattatagttttattgtggttatgttattatttttatttgtattgaaggtagatttatttattattttattatagtttgtaggattaataagagttatgtttaaagtagttaaggagaaatttatattattagagtttttggagttggaggtttttataatttgggatttttttattttagaatgggataaatgaagttttagttgtgtaagaattatatatattatattaaaagggagtattttttgaattttttaatgtgaaaaggaatagagagaaatagagagagaaagagggagagagattttatatataagagttttgtataatagattatgatagttattatttttattgttattattattatgatttatttagttttggtttttttttatttttgtttaggaaaaagaaaatttgtatttttgatatagaagtgggtttaaatttaaggtttggttaattagagttttatattttatggttaaagtgattggttgagaaattggaatgttatttaagttaagttttcgttagattattaaaatggagttgatatgtttgatttgttgttatttagatgatgagttgaaaatatgagatgtttatttttatagttatgtaggaaatgtttgatttttataggagaaaataagggtaattaataggaaaaaagtcgaatttaaagagatttatatagagaatataagtaagagataaagaaatatatatatataaagagaaatagagattgaaagatgtagggaaataaataatataaatataaaatatagataaagaaaaagataatgaatagatggaatgatagagaaaaaatggtagtgaggtatataggttagtagagagatggaaggggggaaaagaggtggatagagagataatttaagaggtagataataaattatatatatatatatatatatatatatatatatatatatatatatatgtaagagagagttatagagagaaaaagaaatagcgatttagagaaatggatataagggaaaatgtaaatcgaagaaagaaaagttattaaatatattaatggggaggaggttttttagatagagatagaaaagagatttgaagagaaaggaagagataaatagttagagagaaatatagagtagaatgaaatagaagtgtattgatagaagggaatgagggtagaagggggagagaagggttagagagatagagggagggaaatgaaagagaagagagaaaaaggttttatttgtgtttagtatttaagcgttttttagaagttaaatttatttagaaattttgattgtatgagttttaaaattaatttttttttttaagatggtttaatagagtttttattataagttattaaaatattattttttaataaaatttttattggtaattatataattggggaggttggatggaattaataattattgttttttgttttgaagaatacggtgtatttattagaagatatttgtggtgtcgtttggttaagttatggtattaggtattatgattggtgtaaaataattttatttgtataaataagtgaaattaattagattattgtagaagttaggaaagattgttgtatataattttaatttttaagttttattgataatggaaaattaaatttattttatattttattttatatttttatgtagtatttgatttagattaagtatggggatttatgatttttgagtgtttttttttggatattgttttttttgggggttataattgaattaaagttttagaatttgattttttttttagtttaatgttttttattaatattattattttatttaattagaattagaaatataagtgatttataaatttatttaattttgaaaaattaattattgaattataagaagtttgatatttagtttatgattagtttttagaaatagaagaaggtagtaaaagtttatgaaagtatttatggtttaaatagggatagtagatagtagagagtagagtttttattattatggtagtgagtaaatatttaggaaattttttgtaggtaggaatttaggaaagataagaataagtaataatttggtagttattttttagttattatgggagttatgttttgatgggtgatatagttggtagaaatggtttgtttataggtttgatagaagagtagttgggaattatagataagagtaaagttaagataagataagaaagaggtgatagattttagaaagaaaaatgtttgtagttaatgcgtgagttttttaggagatagaagaaataattatatgttatattaatttttgaagaaatatagttttttttttttttggggtttttttgtagttgttaggatattaaggttgagtttatgttaatatttgtttttcgttattttttttggtaattgagtagagatggtaataggaatgttttattttattgtgttatgttttgttgtgttttttaaatattgtggttttttaaaaattgaagggttgtattaagtaagtttattagtattattttattaatagtatgtttttattttgtgtttttgtgttatatgttcgtaatttttgtaatattttacgtttttattattattatatgtcgatttgtgattagtgacgtttgatgttattgttgtaattgttttggggtattatgaattgaatttatataagataattaattttattgttagatgttgtgtatgtttagattgttttattgattagttattttttttttttttcgttttttttttaggtttttttattttttaagaatataagaatattaaaattgggttagttagtaattttataatggtttttaagtaaagttatttgttttttattttaaattaaaagttagatatgattaagtttagtgaagaagataggttaaaagttaagatgggttaaaatttaggttttttgtttttaataattagttaagttgtgaaagtaaaggaaaaggttttgaaggaaagaaattaaaattgttatttaagtgaatatataaatgataagaaagtaaaatagttttattgttgatgtggaaaaagtttgagtgatttggatcgattaaattagttataatatttttttaagttaaagtttaatttagagaaaggtttttattttttttagttttatgaaggttgagagatgtgaggaagttgtaggaaaaaagtttgaatttagtagaggttgatttatgaggtttaaggaaaaaagttatttttataatattaaagtataagatgatgtagtaagtggtgatatagaagttgtagtaatttatttagaagatttagttaagattattgatgaaggtggttatattaaattatagatttttaatagagatgaaatagttttttattggaagaaggtgttttttaggatttttagagttagagagaagttaatgttggttttaaaattttaaagattaggttgatttttttgttagggattaatgtagtaggtggttttaaattgaagttagtgtttatttattattttaaaaatattagggtttttaagaattatgttaaatttatttcgtttgtgttttataaatgaaataacgaagtttgataatagtatatttgtttaaaatatagttggttgaatattttaagtttattgttgggatttattgtttagataaagatattttttttaaaatattattatttattgataaggtatttagttatttaagagttttgatgaagatgtataaggagatgagtgttgtttttatgtttgttaatgtaatatttattttgtaatttatggattaaggggtaattttaatttttaagtcgtgttatttaatatattatataaggttattgttgttagagatagtgatttttttgatggatttggggaaagtaaattgaaaattttttgaaaagtttttattattttagatgttattgggaatatttatgatttatgggagaaggtcgaaatattaatattaataggagattgggagaagttgattttagtttttatggatgattttgagacgtttaagattttagtggaggaaggaattatagatgttatggaaatagtaagagaattcgaattagaagtggaatcggaagatgtagttaaattgttgtaattttatgataaaatttgaatggatgaggaattgttgtttgtggatgagtaaagaaagtggttttttgagagggaatttatttttggtgagatgttatgaatgttgttgaagtggtagtaaaggatttagaatattatataatttagttgagaaagtagtagtagggtttgagaggattgattataattttgaaagaaggtttattgtgggtaaaatgttattaaatattattatatgttataaaaaatattttatgaaaggaagagttaatttatgtagtaaattttattgtttttttattttaagaaattattatagttattttaaattgtagtagtagttattaatattaaggaaagaattttttattagtaaaaagattataatttattaaaggtttagaggattgttagtatttttagttataaaatattttaattaaggtatgtatttttttagatataaggttattttatatttaatagattattatatattgtaaatatgatttttatatgtattgggaaattaaaagatacgtttgatttttttgtagtgttgtttggaattaaaattataatatatttgaagtgtattttattttgttaaagtgaatataaaatattagtttgaaggggtttgtggaaggtagaagaggatgtcgaaatgttttggtgatgtataggtcgtggattaattggaatggtaataattgtaatttttttttattttatttattattaagtttagtagtattttttgtaatttggggatttgggggtattatttaagttttattgaatgattgatattataggtcgggttttattttgaggaataatttttgaagtttagagtagagattttttagaatattttagaatttttttagaattttttttagaatattttagaattttgttttatgttatatttatttaggaatagtaaaataattgaagtatgtttaggtgtttagagaaatatatttaatttttttttttattttatgtgtgttatatttttgggtaaggagagtagggattttatttgtgagtggagttttgtttatttaagaataattttttattatttttttttgtaatgatgtagatatgatttaggttagggagtttttaatgtttttaatttttgtgatttatttttatttttattttagttgtttttttattatagagttagataggacgagttataataaaaagttttagttttagtattagtttttttattttttttaaaggtgttttattttttttattttaaaaatggttgggttataaggtttaaattaagagagattagttttagtataagattttaaaggttatttagtattttgttttgggtagatttagatagtgtttttgggaagtgaaagtttgtgtgttagagtttgtttttatattttatagtgtttttatttggaagtttggagttttatttaggatgtaagagatagaggtagtttgttattaagtaaaggagatgataggtaggtaaagattttaaggggtagtatggatggatgaggaggaggggaaaaaggagatgataattttttaaggatatgtttttttataattttatagattatttttaagatattagttttaaggttaaaatttagaattataatattttagaaggtatatcgataaggttgatttatagtttgggagttaggtgatgtaaaggggttattataataaattgggagaaaaggaggttagtttttagaaagtgtattttgatttgagataatgggattttagttttttatgattattagtttagaaattatatcgggatatagttgtgtaggagagaaggtatgaaaatgtataataagtagaggttagtagtgattttatttttataagatttagaatttttttatttttttttttttttattgaatttatgatattaataaagtgttttttatattattttattgtgatgggattttggaggttggggtgttttagatggtaggtgtagatatttttatgttcgggtattatttttagtattataagaatttggtaggtttaatttttattttgaataggtgtggatataattttagtagtttgtttttgttttttttggaattatttgagttttatttggtaaggaaagaaatttgttattaaatagattagtaaattgtgatggttgatttttgttttagttggggagatggttattgtaggttttattaggacgaatgataataggaaaagaaatttagagggtaaggtagtaaagaaatttttattatgggtttatattttttttttgatattaaagtggaaaagatagtagatattaattagttttttattttaattttagatttaggttttaattagttaagtattaagtagtttgttagtttattttttagaaaagtaatatttttatttagtggttatttgtttattaaaatagattatttatgtgaaagttttttgtaatatagattgataatattttaaatattcgtatatatatatatgtgtaggtatatgtatttgtttttttatgtttggtaaaaataataattaaaaaagatttgataatgtgtaattatgtgtgattttttataaaatagagatttttatgtttaagtaaatttttagttttattatttataggttttagggaaaattggttagttatatgtagaaaattgaaattggattttttttttatattttatataaaaaatttttgatttttttatttttttttttatttttatcggtttttgttttatgtatttcgatgttttgttgttaggtgtatatatatttaagattgttatgtgtttttggagaaataattttttattattaaataatatttttttatttttggtaatattttttgttttgatatttattttgtttagtattgatataattattttattgtggttttgatttgtatttttttaatgatttgtgatgatgagtttttttttataggtttgttagttatataaatgttttttttttgagaagtgtttgtttatatatttttattattgtttgatggggttgtttttttttttgtaaatttgtttaaattttttgtagattttggatattagttttttgttaaattgatagattgtaaaagtttttttttattttgtaggttgtttatttattttgatgatagttttttttgttgtgtagaagttttttagtttaattagattttatttgttaattttggtatttgttgttattgtttttgatgttttaaagttttttttttgtttatattttgattggtattgtttaggtttttttttagggtttttatggttttaggttttatgtgtaagtttttaatttattttgagttaatttttggatgaggaggaggagaaaaaggggcggtaattttttaggagtatgtttttttataattttatagattatttttaagatattagttttaaggttaaagtttagaattttaatatattagaaggtatattgataagtttgatttgtagtttgggagttaggtgatgttaaggggttattataaaaatttgggagaaaaggaggttagtttttagtatgtttttttgatttaagaaagtggtttaattttagtttttgtatatggttagttagtttttttaatattatttattaaatagggaattttttttttattgtttgtttttgttaggtttgttaaatattagatggttgtagatgtgtggtgttatttttggggtttttgttatgttttattggtttatatatttgttttggtgttagtattatgttgttttggttattgtagttttttaatatagtttaaagttagataacgtgatgtttttagatttgttatttttgtttaggattgttttgttatacgggtttttttttggttttatgtgaaatttaaagtagttttttttaattttgtgaagaaagttaatggtagtttgatgaggatagtattgaatttgtaaattattttggttagtgtggttattattataatattgattttttttatttatgagtatggaatatttttttatttgtttgtgtttttttttatttttttgagtagtggtttgtagttttttttgaagaggttttttatattttttgtaagttgtatttttaggtattttattttttttgtagtaattatgaatgggagtttatttatgatttggttttttgtttgtttgttattggtatataagaatgtttgtgttttttgtatattgattttgtattttgagattttgttgaaattgtttgttagtttaaggagattttgggttgagatgatggggttttttaaatatataattttttgttagttagaatggtgattattaaaaagttaggaaataatagatgttggagaggatgtggagaagtaggaacgttgtatattgttggtgggggtgaaaattagtttaattattgtggaagatagtgtggcgattttttaaggatatagaattagaaatattatttgatttagtaattttattttggttatatatttaaaggattataaattattttattataaagatatatgtatatgtatgtttattgtagtattgtttataatagaaaagatttggaattaattcgaatgtttattaatgatagattggattaagaaaatgtggtatatatatattatggaatattatgtagttataaaagagaatgagtttatgttttttgtagggaaatgaatgaagttggaaatgattatttttagtaaattaatataggaatagaaaattaaatattatatgtttttatttataagtgggagttgaataatgagaatatatggatatagggaggagaatattaagaaaaaaatatagaatattataatattgtaattgtggtgtgtaaattatttttattttaagtagtaagattacgtgatgaattaataaaaaataataattataataagtttttaagatatagtataataagatgtaaatagaaaaaataaaaagttaaaaagtggggagatgaagttaaggtaagtttttattaatttttttttgattttgtttgtatggtatatagttttatttattttatttttaatgtaggtatgtttttatatttaaaatgggttttttgtagatagattatagtttaattgtgttatttttattgtttgattttttttattatttaattggtgtgtttaggttaattatatttatgaaattattaatatggttggattatttttgttagatattttttattaattttattaaacgtttgtttatttttaaaattgtttttttgtttttttttggattagtttttgttttaggattttatatttatgtataatatatttttaaatatattttagtttagtatgttttaaattttttttttttttatttattgtgtaattgttattatatatttttttatattttataaatatataatatattgttattaattttgttttagattttttgttatttataaggtaattttttaaagataatttcgtttgttatttaatattatttttattaattttttgttagtaataatttttatatgaatgaattagttgttttaaatagtttttttaaataaattatataataataaaaaaatagtatggggaaaatattgttttttaatagttttttgtgggaaaatacgtaaaattatttttatgtgtagatttgtttttattatagttttaggttattttttagttaaatagaataggttatttgataaagattttgtgtagagattatagtatgtaattaataaatatttgttgagttgaattgaaatttttaatttatttgaattaggttgtagaattgattattgggaaatagataatattttttacgtttaatagcgattgattttttttttaggagttttttaattttaatgtatatattgtgaacgttttttgaatagatttttttatttatttatttttagagacggggttttgttattgagatagttaggtgggaagggatttttagataaattttagttagtttgagtattgggaggagtgtaaattgggacggagttatagaagtttgtattatttgcggtagggaggagagtgattttttttttttgggtggaacgtggaatttaatttgtgaggtgggaagtttattggtagaaaaaaaatgtatttttttattttgttaagagtttttgtttttttttttttttttttttatttaatatttaatttttaagttgttttatttattttttaagttgtttgtgaatgtaattttttgtggttgtgtggtaaggacgttgttattagttgaattaaggaaaagttttgtaatattatgttttttaggttggttttaaattttttggtttaagtgatttttttattttagttatttgaattgttgggagtataggtatatatttttatagttagttgtatagttatttttatttagtattagtgattttaaaatgataaataattttaaatggaaattttaaaagtaagtgtttatatgaaattatttatatgtatttattaaaggttattatgtatatgtaaagtattttatttagaaattttaagttgtgattttgttagaatattaaaaatagaaataataatataagaataatttaaatgttttaataattgataattttagggaaaaatgaatttagatatgtgtgatgtttggggattttgaaaaatattttaaataaaagaaatattttataaattatttataatgatataagttgagtaaaaattatttttgttatagtatttttttaaaagtattttattgattaaagaagattggtaaggataattttgtatttgagagatggtggagtttgaaaggtttataatgggtattaaagagagaagatgggggtaggggaatgtttttatttttatttgttttttttttcgcgtttatgtatttgagatagttatgtatttattattatttttgagtcgtgggaatattggtgtttatgggatttttgtattataagaaatgtaaaaggaagatttttatacggtagttatatgatattatatagaaatttggatttatataaagaaataaattttggaaatgaaatatttttttatatttaaaaaatggtttaaaatgaggttttttaattttagaattgttggtattttgttttaggtgattatttttttgtaggaggttgttatgtgtattgtaggatgtgtaatagtatttttggtttttatttaatatatgttagtagtattttttttagtaatgataataaaagtatttttagatattgttaagtattatttgtaggaattttttattggttttattttagaatgtttgtgttatagaattatacgaagatattaaatcgttgttggaagttattaagttttggaatagtttgttatatagaaaaatttgatagatataatagtttttaaagaagttttgttttttagaaattttttagtgtttttgtggtttataggtttttatatgtttggagtgttatagggagaagtttaaatgaatgaagaaaaagtaatagtttgttttagtttaatgtgtgatgttattattattattattattaatatttgtttttatgtagtagtttttatttgggaatagttgttaggtgttagatattggtttgtatttaattgtataatttgtatttatttattattttattatattaattattttttaatagtttttattttatattatagaaaataattttaaggtttaggtattttgagtggtttgtttagggtgatggagttgagaaaattaaaagtagtatggaatatatatttattttattataaaatttataatatttttattttgttattttagattttgttattgttgtgaagtatttttaattattgtaagatagaagtttcggtttttagagtaaaattttattaatgtataaaattagatttaaagatagggttttagagaatgttataattgttttttagaattaatataatttttgtttaattttttagagggtttttaataatattaattgtaatggtatattttattgatattttagttataaaattaacggtatgttaattagtgttttttaagaaagttattaggtaaagtagtattttgagttttaaattttatttttattattattttatgaaaaggattttttttttttttttttttttttttttttttttttttttttttttgagatggagtttcgttttgttattagattggagtgtatggagtgtagtggtgtgatttcggtttattgtaattttcgtttttcgggtttaagcgatttttttgttttagtttttcgagtagtagttgggattataggcgcgtgttattatatttagttaattttttttttgtttttgtttttgtttttgtagagatggggttttattttgttggttaggatggtttcgattttttgattttgtgattcgtttgttttagttttttaaagtattgaggattttttttatttttataagtaagaaattggtttttgttaaaatggtatattgtttttttgagtttaatttattgattattttattttgtattaaaattatgatttgaaaatagaagtaaatagaataaggttcgttatattttggttggatgaagtaggaggaggagagggatataaaattagttaaagatagaaagggtatttattattttttagttaatgatttggttttgtttggattttttttttattttataggatgtgagatttgagattgaatttatgattttttttttaagatataattttgattttatatttaatattttaattttttaattagagttgagttttttaaattgtgatattaataggggaaattttggagtattattaggaaagatttagtttatttgttaaaattttaaggaatttttgttagatataaagtaggtaagtttggatataggggaaaaaagatagaaatgtgttatttattatatagtaaagaggatgttgtacggtgaagggagtagagtttaattgtaatttttaaaatttttttagtttataatggtagtggttagaaagagtaataaggttacgtatagtgttatatattttttttaatcgtattagggtatttatttagaatttatatagaaggagatattttttattttttatgaggaattatggtttgtttttgtagtattttatttttattatttacgagttatgtgattttgggaaaagttttttatttttttgagttttaatgttttttttgaaaaatgtggatgatattaaagtatgataagtatttataaagagtaatttattttaagtgtagtatatgtatattttttataatcgtttaatgaggtattattagtgttttcggttaaagattacgaagagtatatttttgaatgaataagttggttttattgttcgttgtaatgatggagaaaagttattatggggaattatgtagtagtttagtaagagattgttggaattaaagaagtagaattaggagaatatatatattaagagaatgattgaaaggaattaatttgtgtaattgtgcgggtggattagggaagtttaaaatttattgggaggtagttattaggaaaggtaggttgaaatttttagtattggttgacgcgttgtttatagtggaatttttgtttttttagagaagttttagttttgtttttaagattttttaattgtttagattaagtttatttaatttattttagataaatttttatttaaagttaattgattatgaattttaatgatatttataaaatatttttatagtaatatttagattattagtgtgtgaataattggggattatagtttagttaatatataaaattgattattaattaattgtaagatttgtgtttgtgttaggtagttttgaggaggatttaagaaagagggattttatttttaattggattttgatagaaagtagggagtggggatggtaatgttatgattgggtagttttataaatattatttagagggacggaagattattttgaggttacggttgtgattggtaaagaagtagtaattattttttcgagagatgtgtttggttatttttgtagtttggataatatttatgttttgtttgggtgtagacgtgatgattgagtggttttattttttgttttagtttattatatttatggagtatttgtttgattttgatgttttatgaaattgattatttttaataggagaattaaaattagttgtgaatattaggttagtttttagtaattttaaggttttgttaattgtatttaggtagtttttaggtattaggatatttttttattttatttttttttagtttttgttattgggaggtaagataatatgttgagaattttagaaggttatttaataaggatagagtgattttaaacgaaatttttattattaatttgttgtttttataatatatagaaaatagatttatttgaaaaaaggtaagtttttttgtgatgattatattttagtttattttttagttttttgtaatatttgaaattttaatgtggttggataataaatatgaaaagatttagtagtttaagaaaagtaaatttattttttaagttaaagtaattttttttattttatttttaatatttgatttgatatttttaaatttaaaaaaaataattattggtcgggcgcggtggtttatatttgtaattttaggattttgggaggtcgaggtaggtagattacgaggttaggaaatcgagattattttggtttatacggtgaaattttatttttattaaaaatataaaaaattagttgggcgcggtggcgggcgtttgtagttttagttattcgggaggttgaggtaggagaatggcgtgaatttaggaggtagagtttgtagtgaatcgagatagtattattgtagttcggtttgggttaaagagcgagatttcgttttaaaataaataaataaataaaataaaataaaataaattattagagtaattgagttagttaaagtttttttaatgtaattaatgtttttaaattttttttaaatatatttaagtagtatcgaaatatagagtataaagattattagaagtaaaagaaaaaattgtgtaaaagatcggttattgtaggtagtatcgtatgatagtttaatttttttaattgttttggttaaaaatatttggagtttttgagaatttatttaattggatttatataagtagaaaaggtaaaggtattgtttggttattattagtagagatttttaggaaggtggggttaagttaaaatttggggaatattatatatattatggaagtaaaaagaaaaatagttaatttatatatagaagttagagaaaggggaggggatggggattgttagggaggaaaattattttagggaagaatttttggagaatgtaatttagaaaattttgaaggatgttatattattgatgattttatttatttaagcggttgtttagaaattttcgttttttttgatattagtagatatgtatatatgatagaagatttagatttagtattttttttttatttatagaaaatttttttaagattatgttgtgtggaggatgtgttagaattagaggatgtttttgtttttttttagggtttttaatataaattttgtaattggtaaataatatgttattataggggatttttttgattggttaaaatttgatttggtagggtttggtttgggtgtttttagatttgtttgtttcgaggtttttataattgttttatagtttagagtagtaattgttgaggttgttttgggaagaagatgattttaaataaagttttgttgttgggggttttcgttttgattgtcgtgatgagtttttgtggaggtgaagatattgtgggtgagtgtatgagtgaggaatgttttttggagttgaaaaatagtaaattaaaggaaaagaaagagtgtaatttgttaagaaatagtagaaattttttaagggtttttttaatattaagaaattttaaaattatggtagttttttttttaggaaattagagttttaatcgattttttttgttatttgtgttattggagtttattaaggacgttgttttgtttatattatatttagagattatagtttggaggtttgtgtggtattttattatgattgttttaaagattagggatgtttttatgaatggagtatttttttgttattaaaaatttttgaattgttatttttaaatttttttgaataatttttgaagttttttatatgttttttatagtatatgttggggtagatagttttatgaagtatgtatattttatagatataaagaaagaggttttttttttttttttagatttatatttttatatgggaattggtataggtggggagtaggtgaaagagtttagtaggttgaatgtttttaataattattttattacgtggtaaatgtggtatttattttttgttattttatatatgttatttcgtttatgattaaataaaatgggtatgtagatatgttttatgaatagtaaaaatatgaatgttaattttttttaatttatttttattataggtataatttcgtattttttttttagtaaagtaaggaatatattttaaaattgagaattttatgataaaatgtttggtaaattaaattattttatttttaaattgttaatttaaattatttgttttttattttatttaatgaagttttataaagagaaaaatgggtaggtatagattatttggttttttagttttttttgtttttgtcgtttatttttttttatttttttttatgtatttttttttttttttttttttttaggatttatttttgattttttgtttttttatagatatgggtagtgggtttgtaaaataaaagttggaaagttaaatagttaaaaggggaagtgaattggaagttattcgaaatttttataattttattaattatagttgtttttattttgattttgtttggtagtggaagttttatttgtttttttagagtatttggttttttttttttaaattttttttttttaattttatattagagtgtttcggttaggttcgatttatttattaggaatagtgtgggtagtgaaggagattttttaaattgtaaagttataagagaacgttttaattcgttttaaaattagaagaaaaatgaagttttatagtttatgaaaatgttttaatttttttttttttttgacggagtttcgttttgtcgtttaggttgtagtgtagtggcgcgatttcggtttattgtaagtttcgtttttcgggtttacgttatttttttgttttagtttttcgagtagttgggattataggcgttcgttatcgcgtacggttaattttttgtatttttagtagggacggggttttatcgtgtgagttagaatggtttcgattttttgattttatgattcgttcgttttaattttttaaagtgttgggatttgtataggcgtgatttatcgcgttcggttttaatttttaatgtagtttggattgtatttgtttttatattaatataattagaagttgtaatttttcgtatttttatggaggaaggcgtttataaaagtaatagtgttcggggtttataagttagaatttagttttgggtatttttgattttgggttttgcgtggttttgttatttgggtgtttgttagttttttttaaaatttatgtaattgttaaaaattgtaattgttatttaatatatatgtttgagtatataatgagttaatttttgggaatttaaagataaaaaattatgttgtttgttttgtagagggtgtataaattagtgatggaaatagtatggggtataggaaagtagaaggttttgttgagtaggatagtggtttagtagaggttgaaattataaaaatgatttggttttagttgggttagtagagtgatgttttttagtaatatttagtatttaggataagtattagatgaaaagaaggattgtatgtattttatatatatttatgtttgaataaggagttaaagtttattgtaaggataaggagtttttgttggtggtttgttaagtaattaattagggtagttatgttgggtagggaagaaggtgagttggaggaggaatagataaatttggagagttagatattgagattttattgaggcgttggaggttataacgcggttaaaaatatgttgagagtatttagttgtaaagttgttaattaagtagaaattttaaggatgaattttaggatttttttaggaaattttaaaagataattttttttagggagaaaaaatagatttttgtaaagatatgaaaggaagtgtagtttggtttgattggtagatagttgtgaagaatgtcggattgtaaggttgtcgatattttttttatagaattttttaaagtatattgtatttgtttttttatcgatttgatttttttattatttagtttattttttgatgttgttttaagtaatttttgttttgtttgatatttttggatgtttagtaaatgaggaaggaaggaaggaaagataaaatggtaaagggtttatatatgttttaataaaaatgtttagttcggtttatttggttatattttatggttgttgttttgtttttgtattttcggataagtttattgtttattagaggaaaaagggtttaatttatttgagttttcgagtgaatgtaattgttgaattagaatattatagatatttagtaattttttttagaggaaaaaaaaaaaaagtgggggtaatgatagaaattaaaaaattagtcgagtttttattttttattttagaagaaattaggtgtttttttttaaggattattattattaataaaatagagattttagaagaattgtttatttgttataaatgtataatgttgttatttttgtaatagtttttttcgtattttataattgttagaagaaatttttttaagttaatacgtttttatatgtttttttttggtttaaaaaaaaaagaataaaggaaattttgtgtagaaagtgttttgttttgatttagttttgataggaaacgaagtataattaatttgttattaattgagagagaaaatttaggaagtagagggaaataaattgaatttttgagtaagaaaattaaattttatgataatttatttatttttttttttgtttattgtaatatttattataagtttatgatgtgttaggtattaagtaggtatttaggaaataatagacgtgtgacgttttgtttttgtggagtatatgttatagtgagaaagatagaattagttttaatttgatgattattaacgttaggtaaggaggaagtaggtgttaggaagattgtttagggattgtgttaaagatgaagtttataatatttgaaagtgagtttttttaattattttttgtattaaggttttttttttttgtgttttatttttttgtttgttatttttattcgttagttgattatgttgttttttatggtgtgaatttttattagttttacggtttttttggttagtatatttatgaatttgatggagacgaggagttttacgtggatttggagacgaaagagattgtttggtagttgtttatgtttagtaaatttataagttttgattcgtagagtgtattgagaaatatggttgtgggaaaatatattttggaatttatgatgagatagtttaattttatcgttgttattaatggtatgtgtttattatttcgtttttttttattgaaattaattttttatattaagttttatttttttttttttaagagattttcggatttttttatggtaattgttgaaattttattattttttatttttaaaattatatatttttatgtaatataagggtttttttattatgtattaatttttattttattaaatatgtttatagagagaagggtataggaataaagtagaggtaatgtgtcgttgtttttaagtagaaggtaaataagatttttttgattattaggtggtgaaatgttggtaagagggtttttttaggatgtaatgtagaagtttatggtagagttatttatattttatattagtgttgtttttttattatagaggtttttgaggttatagtgttttttaagttttttgtgacgttgggttagtttaatatttttatttgttttgtggataatatttttttttttgtggttaatattatttggttgagtaatgggtatttagttatagaaggtgtttttgagattagttttttttttaagagtgattattttttttttaagattagttattttattttttttttttttgttgatgagatttatgattgtaaggtggagtattggggtttggacgagttttttttgaaatattggggtaaggatgagttttattattttatgggtttttaataatagattttatttttttttttaagtttggggttttgagttttgtagagttagttttttattttattttattttatatatatgtatatgagtatattgtatattttgattttaatagttttatttttatagagtttgagattttagtttttatgttagagtttatagagattttggtttgcgttttggggttgtttgtgggttttatgggtattgtggtgggtattgtttttattatttaaggtttgcgtttagttggtgtttttagatattaagggtttttatgaattttattttgaaaggaaggtaagattgagatttgttggagttgaaattttagtatgagagggaggaaagtgggagggggttgtggatatgaatgtggttgaaagttgtaggcgaattgggaagtggtatgatgattatataggaggttttttagatttatcgattttatgtttgttttgttgtaggtgtattattatttataggagaagaagaatggatttgttaaatgatttagtattattttttggtttgatttattatatttttttttttttttaaatgtttttttttttattttttttttgggatttaaggtgttatatttttttagagtttataaatgttttttaattttttttttgatttttttttttgaatttttttatttttttaaatgttatttattaagggatgtttgagtaagttatttagttatttaattttttaatgatttttatttaaaatttttatggaagtaataaatttttttttgatgtttttattgaattttttttattttttattttagggttgattgagagtataatttagaatgggtgatttttatgttttaggttaattttatgttattttttagattatattttatgtttagtaatataggagtaattaagtatagtgtattttgataatttgttgattttttaattggtgttaatattttttttttttttttgtttttatttttggttattgttatttattttttaatttaggtattaacgaattttttgtttttggtttagaatggttatagtagaaatataaaaaaaaaaaaaaaagtttgtattaattttaatatggtttttaaaaggaatgatagagaaataggatataagaattttgaattttaaaagttattaaaagtaaaaaattttgttattaaaagttaaattgtatttttaaaattttaaatttgtgaagaatgataatagtagaagttttttttttttttttttattttgaggagataaaaattttttaggtaggaaaagaaatggaagttagttagaaaaatattgaaataaggttaggtacggtggtttatatttataattttaatattttgggaggttaaagtgggtagattatttgtggttaggatttggagattagtttggttaacgtggttatattttgtttttattaaaaatataaaaattagttgggtatggtggtgggtatttgtaattttagttatttaggaggttgaagtaggagaatcgtttgaatttgggaggtggaggttgtaataagattgtgttattgtattttagtttgggtaatagaatgaaattttattttaaaaataaataaatatatataaataaattttttaaaaaagaaaaatattaaaataaggtaataatataagtgggtatttgaaaaggaataaatgtttgttttttatttagggttagtgataatggaaaatagatagaagtagaagttatagatttatttaggggttttagttttttgtttttttttttttttggttaaggaaagtatgagtttatgagagagaaattttaggaagaataagatagttgagataatgtagtagtagtagtgggtgttgtgttttatattggattcgtggttttttaatagaaaattttttagaggaaatgggtttatagagatttgagggttttaaatagttatgaaatttgttaggatatttttgtttatgttatttgtattagtgagtttaaaatgtaataggagaaaaaaaagagataaaatattaatataataattgatatagtatagttttgtataaagaaatttaaatttaaatatttgatttagtattttgaagttaatattttaaattttattgggtaaagtatttgattgatatttttgaattttattttttttatttataatgtgggagtgataatattttttttgtagagttattgatagaatttgaataattttggtatatagatagtgttttatacgtagtatataaatatataagaaaatattgtagttatgtttataatggatttattaaaaagaatggattatattatatgaaaagtatatttgttttttttagttttttagtgatttaggagatttaagcgtagacgtaaaagtgagtttttttttatatgttaattggaggattttttttttttttgagaggttgagattgggttgataagagaatttttaggataagaagttgtaatatttgatttcggtttttaattttttaaggggtatattttttttttatggtttataaattttaagttaaggtgaattatatgtaatagtagtttatttatatttattttggggaggaggtggggagatttcgggagaaaataattataaatgtagattgggaattagtaagtgtagggaatttgaattagtggtgattatgaaaacgtttattatagaatatagaggatttttagggtaatgaaattattttatttgatattataatggtgaataaatattattatgcgtttgtttaaatttatagaatgtataatattaagaatgaattttaatataaattatggattttgggtgataatgatgtgttagtgtaagtttataagttgtagtaaatgtatttttgtcgtggaggatgttattagtgggggaggttatgtatgtgtgggaatagagagtatatgggatatatttatttgtattttataatttttttgggaatttaaaatttttttaaaataaattttattaaaaaaaaagaaaagaaaaggttaataataatgattttaaatatataaaattaaaattgtagtataaaaatggttatatgaaaatgtatgaatgtgttaagaatttttttgtaataggatttaaaataaattttatataaattttaatgatttatgagttaagaatttagtattttggaggtgtgtgtatttgtgtgtgtgtgtgtgtgtgcgtgtgtgtgtgtaaggtttatattgaatggtattataattagagttatatagaaatatataaatgtttttttatttagaatttttttttaagaaatattgaggaaagtaaatataatggtagttggattttattgaaagaatgtatttaaaaagtatttatataatgttaaaatagtatagttaaaattagttttataaaatagagtaaatatatttttttattagttaaaagtttaaagtgaaattattattattatattattatattattattataaatagttataaattaggttgtatgattttaaattaaatgattattaaaaattgttatttgaattattttagattatatatataaagtatgattttattaataggtaatattatattgtttaaattttataaaatttttagttataatggtttatgtttgtaattttagtataaggtgagggttttttaaagtttaggagatggagattagtttgtagttttagttagtagggaggttgaggtaggaggattgttgtttgagtttaggagtttaaggttgtagtgagttaggattgattgtattattgtattcgttttagtttgggtaatatagcgagatttcgtttttaaaaataaataaataaatgaatgaatgaataaataaaaattataaaacgtaaaaattacgtaaaatattttaggtttgtatttattatatataaattagagatatgaagaattaaatattataaataaagtattttatatatagattggtttatagtaagtagtttatagaaattaataaatttgtgttattgttattttttggagtttaagataaaattttatgatgaatgatattataaggatgtaagtaataaaatttagaatatgagaagttttattagattaaataaaaagatttttttagtaaataatttgtaaaaaaagttaaaaatagagaaaagaaaagttatatatttgaaaaagattgaagaaatatagtaattaaatgttgagttttgtttagatttatatttaaataaaatatttgttaaaaaatttatatgaggtaattagaaaaattgatattgagtgtattaaggaattatttatttcgttttaaatgtgttagtggtattgttgttatgtttttaaaaagttattatattttagatttttataataaaaatgtataaatgaaatatgatatttaaaaatatttttaaaataatttattatgtgtttgtatgataattgggtgggtttataaaattgtttatgaattgattattgttaaagtaaggttgttgatatatggaatttttttttgtattattgtatatagttgaaattttttgtaatataaaggtttttttttttaaatgtatttaggaaagttttataaatataggtagataagtattttgtttgaagttatgttagttttttagttttttttatttttattatatttaggaaattttgtttaaggtttgtttaagattgtaagaattttttaggaatgtaattgtaaagaatgtgtatgtaggaattaataataataaaggaaagtaaagtaatgtttgttttattattggttggattaagtttttagatttgtttatatatttattaatttattaaaaatgtaaaaatggttattgagttttagtgttataataagtatttatagtttgttgaatgttattaaaataatgtgaaaataattatatttattatttttatagaatttatattttagtgggaggaaaatatatatattatataattttataaatatagttataaggtttgaaatatttataaagaaaaagaatgaggtaaaatgagagagtgttgtatagggattaggtatgatttggggtagtttagaagtggtttgaagaaatgtatttttagatgaaataaggtggtatatagtaggtaaaggataaggttgaagaggttagagtaaatgtttgagaaatttttataatatgaaagagaagatgagaataaaataatatgaaaattattatagatttaatagagaaagtttatgtaatagtaaataagtttaaagttattttaattagaatttttgatttgtaaaagtaataatagaatgttaaaaataattggaaaatttaatagaaagattggaaaattaaattaagaaaattttatagtaatttaaaaggtaaaaaaaaaaatataatatatggtagaaaaaataagatggagaatagattaaggaagttaaatattaagtgataaagttagagagattaatagggaagatgaagggagaaaatgattagaataaataataagggaaaattttttagatataaaggatttaatttttttatggaatagttttgttaggtatttagtaaaattaatagatttatttttaaatattttatttttaaaattttagaattttaggtgttatagaaaagttataaaatattttagtggcggaaattaaaatgaaataaattgataataaaaaaaatatttttattattaagataatgagaaagtttttgaagttttaaaggaaaattattttttattaataaatgtagatttttttaaagttataattaggtatggagaaagaataaaaatatttgtgaatgtgaaaggatataaaatttatttattacgtagagttttattagaaattgattaaggatatgattaattgagattgttaattaggatataggaaggtaaggaatttaggaaattgggtttaatttaggattttattgaaaagggattttattatagtagttttttggtaagtaaagaatatttgattatataagtgatatttagaaagtgataaatttttttttttaaatttagaattaatttgtgagtaaagtttaaggaattttattgttatagtagaatgttaatatttttagttttgataatattgggggaaaaaaaaagatgtagatatttaattttggtaattggaagcgtaaaggagaggggaaagggagggtaataatgttaataattttattttttaagaaggaggggaagaggtattgtttatatttatagaagttataaagattaatatatttaaattataattataattggaaaaagtatgtaaaatgatttatgaattagagtaaggttttagaaattggattattattttagttataaaaaaaatggattgttatttttcggtttaagttatttagaagttgtaagagttttttagagttggtttaaattagagtaggtttttatatttttatattgattaattattataggtgagttttttttgggaagtggattaaaattcgatgaggtagtttttattattaaaggtaatttcggggtatgattgatagttgagggtagttagttagtaatatttttagtaatgatagaataaatcgtttagttttaaagggaggagtttaggtatagtggaatagtatcgacggtagaaatattgttttagtttttgggagtatatatatatttatgtggaagaaaataaatagataaaatttagtatttatttaaaaattaaaaataaaattattatatgatttagtagttttatttttgggtatatatgtaaaggaaatgaaatttgtattaaagagatatttgtattttcgtgtttattgtagtattatttataatggttaagagatggaattaatttaattatttattagtagatgaatggataaaaaaaatgtggtgtatatatataatgaaatattatttagtcgtataaaagaaggaaattttgttatttatagtatggacgaatttattggatagtatgttaagtgaaataagttaggtatagaaagataaatacgatatgatttaatttatatgtagaattttaaaaagttaaagttatggagggggtggggtgtggggagagggagaaaaaggaatgagatgttggttaaaaggtataagttttagttagagaggaggaataagtattgaagattaattgtgtagtatggtgattagttaataatattatatagttgttttttggtatttatgagggattggttttaggattttttttggatattaaaatataagaatgtttaagttttttattaaaaatggtttagtttttgtatattatttaagtatgtttttttatatattttaaattatttttagattatttataatatttaatgtaatgtaaatgttatgtaaatagttgttatattgtatttttttaagttgtattatttttatgttgtattgttgtattttattattttttttaaatatttttaatttatggttgattgaattagaggatgtaaaatttataaatatagggttagttgtattgtatatttgaaaattgttaagatagattttaaatatttatattatataaaaaaataagtatgtgaagtgatggatatgttaattagtttgatttaattattttatagtgtatatatatatcgaaatgttaattgtattttataagtatttaattatttgtaaattaaaaataatttaaattttttgaaatgtaatatttttaatttttttttgtttaaataaagttttttgttttttatttttaaaaatttttttgtttaaaaatattattttaattattttaatttttattaatttaattgatttattttattaatttatgaatttttttttgaagttaaatattttatgattattgagaagggtaaagttaatgtgtagtaagattttagtttatagtaaaaaataaattttagtgatgttatttaataaagagatttaattttatagtttttttagtgatttaggttatatggagtttttaacgttttatcgtgtatttatttgtaagttttattggttagtattagttaaatgattttaatttaatagtagaaaagattgggagatgtaaagaattttatggtatattgacgagtaatattgtttttgaaagatatgttgatattttttaaggtaaggataaatgttaataattggtaggttgttttttagaatatttatatatttttttttaagttatatgtcgattaagatttaattttttttgttagtaaatttatttataaaaaatgtatttgttattttaattattaattaaagattatattatttaatgaaatttgggtgtaaaaaataattgtttttatgaaattgttagtggaagaaagggaaaaagattttgatttttttataattaggatgtgtttagtgtgataatgttgaattgaatgttttagaatttgtgttggattgtattaaatacggttataggttgtatgtagttcgcgggttgagggttggaaaagtttgtttgttttaatgataaatttagagattgatatgtagattatttttagggttgagtttatattaaaggggttatagtgtgtagtgacgttttttataatcgggaagagggtgttattaggaatgaataggttacgatgttaatgataaagggagtttagataaggaatgagatggttgtgaataggtatttttattgagggattttagaattagaggaagttttgtcgtttgatttgtgtgttttataagaaataaattttttttatattattttattgtgaggaggttttggaggttgaggtgttttatatggttggtgtagatatttgtatattggaagttatttttagtattagaaggatttggaaaatttagtttttttttttaataagagggatgagtatgttggttggtagtatttcgtgtataggatggtgtgtttgggaggtgtgtatgttatttaggtttggataattagaatttttttttaaattattaaaattttggtagatattttagaaatatatataataaagatagatatatatatacgtacgtatatatatttaaacgaagagagatatgagataaggtgtgaggtaataagaaagatgtagaaaataaagagatgtaaaaagaaaaagagaaagaaatgtagataaatagtgttaaaggattataaaaatagagaaaggtaataatgtagtgaaagagatataagaagggaataaagataaaattggagagagatatatagaaagaattatatagggataaagagatatacggagaggagaggaggatgtatagatggaattataatagaaagagaagagagagatgaagattttatggaatatttggaattagttatttttgaaattaatattttttgtaatatgaattaaatatttttgggttgggtgtttattatttggaattaaaaatagtatttttatttttggttatgtttttttaaaaataaaaattagttttgattgatgtgatttgttagttagaatatatttgaaatattagttattataattgtttttaaataattttattatgtttatttagataatattcgttaaatcggaagagaggttgggatgttttaaggttattgtattgaatattaatattaaagaattatgaatgatgtgatgattgaattgattttttattttttttgtttatttttattttgtattttaagatgtttttagtgtttttttaaagtataattttttttttagttacggtttggttgggttattttaaggtatgtttttttatttggtagtggttttttatttttgtttagttaaggaagtttcgaatatagataatttagaattaggtttaattatgggaaaaagtattaaagttaggtaaatgattttgtttgttatgttttttttgataggtttgtggggggagaatggaaatagagatgttttttggggtttgagtagatatagtttgtagtgtataggtagaggttttgggttagtgtaggaagtagagttatcgttagtgttttgggatggggattatagaaggtgatttgtggttgtatgagttattgtaggattttgattttagtgggataggatgatataggtagttaggaattttgggtaggggtaggtgggtattatagaagagtgatgattaattttagataaaagtttttaggagttagtgtaggagttttggagaagagagatgaggtatgattagtatagggtattttgagggatatatttttttttttagttttgagttttttttgtagtattaaatagaggatgttgaggtttagggtatattattattacgttttttaatatttgtgtaaaggtaaaattagtttatgaggatatagaattttagtttgatgtagatatgtggaggtgggggaatagtagttatttttttgggtaatatgaagagtttgatttttttagtaaattgggtgatattttatttttattattagtagttttttttagttattgaaaatgtttataggtagtagttaataaaatgtggtataaagtgggtattattttattattttatatttaagatgtggttttgtttttatattttataaaaagatgttattaaagttaaggtttggttttaggaaataatttttggagattcgtagaaattggtaaattttttttttaagttttaatttttatagtagtaaataggttatgaatagagattattgtgttttggaatatttcgtttatgttttttttttttttttttttgagatagattttagttttatcgtttagattggagtgtagtggcgttattttggtttattgtaatttttgttttttgggtttaagtgatttttttgttttaattttttaagtagtcgggattatagatgtatattattacgtttagttaatttttgtatttttagtagagatgcggttttattatggttttttttttttatgtttgtgtttttttttttgattggattatggttgaaatattatttgtaggtggaggttttcgaggttttataaaaggaagttatatagagaaaggttttgttaaataaataattattattttattttaaaggaaaatgatatatgtagtttaattggggttatatttttttttttttcgtgttttttaagtttttaagtattttaagttaaaattttttaaaataaaggaaattgttattagaagataaggaggtcgaggttttgatttttttaatggaggaagtttttagaaaggagttagtgagacgatgatgaacggtaaggacgttttggaataagttttattagttagttttggtagcgttattatttatttagtaaaattagattttaatgttttttttaattttgttttgttttttcgtatttttttttagggtaaggaggaaagagttatatttagagatagaatttttttgaatagagggtttgggttatagtttatttttttttattttttttttgggttttttatttttttgatttttgtgacggatgataaggtttagttcgaggaagattagttttagtacgaagtttttaatattatttagtattttgttttgggtagatttagattgagtttttaaggagtagagtttgagtgtgagtgtttgtttttatattttataatgtttttggtataggaggtggagatgttaggggatattagttttttagtttgattattttagggaagagaaagattagttagtaggtttttggatataataggtgggtgagggagaggaggaagtatatttttgttttttaggattttatttataattttaaattttaaggttttagttattagttttaagttagttttttatagttgttagagttggttttggggttttagtagtgttgatatggtttgattttgtggttttatttaaattttatgtttaattgtaattaataatgttggaggtagagtttggtgggaggtgattggattattagattagatttttgttattattttttttagtattgttattataatagtgagtttttatagatttggttatgtaaaattgcgtagtattaatttttttttttttatgtttttgtttttgttttgtgagatattttatttttttttttttttttgttatgattaggagtttttatatgtttttttataagtagaagttattatgttttttttatagttttagaattataagttaattaaattttttttttttataaattatttatttttaggtatttttttatagtggagtgagaagagttaattaaattttttttttttataaattatttagttttagagatttttttgtagtagtataagaatggattaatataaatgtggaaagtgatttttttagtatttggaaagataaagagattaggatttatttgatgtgtttgttatgggtaataggtgttttagttttttgtgatttttagtttagtagtgatgttagggataagagatgggatgggaaggattagcgggagttttgttttttgttttgtggggtttatagtaaaaggaaattagtttttttttacgttattttacggtgatggggttttggaggttggggtgttttatttggtaggtgtagatgtttttacgttggggagttatttttagtattattagaatttggaaggtttagttattatttttaatgagggaggtggatataatatcggttgtttttttttggttatttcgaaattatcggattttgatttgggttggatagaaatttgttattgagtagattagtaggttgtggtggttgagggtttttgttttggatggggagatggttattgtgggttttattgagggtagtaatagatagggaaagatataggagtgagatgtgagattatatagtacgtttgttgtgaggaaggtttttttttggaattagaatagaaagatatttggagtttaagttttggattaaggtttttttaataaatataaatttgataattattgagaatttaaaaataaataataaattttggtttttgtttttatagaatttgtaatttagtaatagagattaaaaaattgaatgttattttaaaagtttgtaatatttgaaggaaaagtaggtaggttttgaaaaaaattaatattgattaaatattatgtttgtttataatttaatttttttatttttttagagcgttgtttatggttaaaaatgatatatttttttttgtatattttatatattttaatttttatttttttggttattttattgtattttttttatttttttagtgtaaaattatagtaaatatttaatgtatgttttatttatttggtaatatgtttttttatttttttgtttttttttaatttttttttaatttttaagatagtgtaattattagttgtttattttattttatttttttgttattgagaattatttttttgttttgaaattagatattattatgtacgttttttataggaaatattttgagatttatgtagaggttggtttgggtgaatgtgtttgtaatgtaaatatatatatatagttgggatttgttgaggttagtaggtagtattttaattaaatggtatttatgagttattgtttggaaggaattttggtttttgtttggatttgaatttttttttaggtttttttttttggagtttgattgaaataatagttagttatgtggggatttataagatttgtttattttaaaagattgaaagtaaaaatagagggtataaatttatgagaaaaatgatagaataatttttatagaaatagatttgaaatggtaaaaatataaataattgatagtattaggatgtgggttagaagaaggtaaggaagttttgtgaatttgtatagataatattggggttagattagggattgattaattagtgaatttttaatgttttgaaagtattattttgttttattaatagtgaaaataggtaggaatagatttattgttgttttttgttaaaattggttttaataaggttttattttttttaggttgtgtagacgagtattgaagaatataaaagaatgttgtgtatttgggggaggttttaggttttagtgtataattgtgggttgattatttaaagtgtttattatgtattaatattacgatatataaagtggtaatgttaatttttaatgtataggtaattgtgttattaaatgatataatttagatggtgtttgttaaggtaattgtttagaaataagtgtttattaagtgggtaaaattgacgtttagaatgtttatgttcgaagtggatagtgatggggggagggagaaaatttattttaaaagtaatttgaaattatttttatttaataatttagtggttttaatttatgtattttaaagtttttgttttttttattgtgttatttgtttagtttttttaagaaattaaaattgttttataatattatttaagcgttgtttttatttttagtaaatatttttttttttagattgtatttataaattttattaagatttaagttaataagagtttatagtattaagtaaaataatagaaaataattgataaagtttatttttaaggttttatttattttttgtttttttttgagtttaagtggatgggtagttgagtatatttatttattaatttaatagaagattattgagtttatattatatgtcggtttacgagttaggtattaggtatgtaatgattaaaatatttttattttaaagagtttcgttatgaatgagagtcgtttaagaaaatagaattacgatgaataataatttgaagttaaaagttaaaatattttattttataattgtaattgttggatgttttgcgcgtagttgtggagtagttttaattttattaggttaagtttgaagttttttgcggcgcgagttgtgtaagtgggttttgttgggtggggtagtgttagtggggcggacgggtaggggaagagggcgggtattcgggtagaaagaattgtttagcgaaggtaaggtacgaggaggtaaacgtataaggtataaggtaagaatatgtagagtagaggataaggtcgatggacggggaggttggggatatattgggtagtttaatttaattttgtagggaattaagggatgtttttgtgtatttttttgttttgttttagattttcgttttttcgatattattttagtttttaaattttcgttatttttttgtattttgggatgggttagggttcggtttttgaggtcgcgtcgttttcgttttttcgtgcgtaagagattcgggtttcggttaagggtgagtttcgcggaaggacgacgacgtttattttgtcgttgtaaggtcgtgcgtagtttcgtttcgtagttgtgtttgtatattttgtttatcgcggttcgtttttgttttaagaagtttttatagttgttttagttttcgatgtttcgttttagttcggttatcgtttggaattttttaacgtcgttgtcgaagcgttcgtatttttcgcggttatagatgtatttggttatatcgcgtacgcgttttgtttcgttggtgaagtagtatatgtttttaaattggattaagaaattttttgcggagaattacggcgggttagttaggttttagtacggttttagttttagtttttagtcggatcgtattttttagtcgttgttttgattcggttagtagttgcgaaattcgtttacgcgaaattgagtttttggttgggttcgtgtttcgtgtttcggatttgggattttcgagatatttttgttttagttttgttcgttttttttgagggtttcgggaatttgtttttttttagggaggtaagagggaaagtttagtttttgtttgagtttgtgaattaagtgaagagggtagtcggatcgattcgatattgatttttgtttttagattagggcgttttcgtatgaaattttattttttatggagtttttgggaattttagagatagagttatttatataaatttgagagtttaagggaataacgagaaaggtttaggaattaagtttgtttttattttgatgtaagtatttttttggtttttgggtaagagattaagtaaatttatgtttggatttattttttttttgttatattcgtttaagtgttttgtgaggtttatttatttttgtgttagaaaggatttatattttcggagttttagaaggaaatatttatttatggaaagagtttaagtttttgaattttatagggtttaattaaattgagttaattattagtttgggtaggttatttaatagaatatttatattataagtataattatataaaaggaaaattatgatatttatatataggatgttaggaggagtgagagaggatttatagaaagtattgttttgtgtttgaatggagtggttttttaatatgtattattttttttttttatttttttttttttattatattaaatttagtttattattaatttaggtttttgaattttatttaagttattttttgtttataaattagtgaaatttaaagtaagattttttgtttgtggttatttagttatttttttttagtattaagagtttgtttttataaattttttattcgagttagtagtatagatttttttatttttaatatagagattatagatattattgttgttttatatttttttagtgtagaaaaattttattgtgtttttggggaaatgtatatttttggggaaatgtataatcgtggagtgttatggttattttgttttgttataggtagtgaatgtatattttgtttttttttttttttttttttttttaggtttaaatttgtgggattggggttggattatttttattttatttattataaggtggaaataaaaatgtaatatagttttattttttaaaaagaataaatggtgataaaagattgtgttttgagattatggagattattattttttatattttaatttaaggagagtttgtttttatagtggtggttttcgagagtagttgttttgtatttattgggaaagtttttggttttagttattggggtgtttagtattattagtattacggttatagttgttgtttaaaagtttttagggatttgtagagttattttttaagatataagtgagattaaggaaaaagtagtggtagttaatatagtttaaatttaatggattttatgtatttgtcggaaagaataaaaatttttggatgtttttatgtgtggtaggattggggagtttttaggaaaggaattaattagtattggagttgaaggattttatttgtttttgggtagatatttttttgtgaagatttttattttaatgtttggtattgttttttttttaaattgtattagatgaatatttgaggtgaagatttttgaatagttgaagattgaatggtttaggggttttaagaagtaaaagataaatgtgatttaagagtagatattttataatttattgtttttatatttgggagttttagtagggtaaattaagtgaggattatattttagggaatagaaaattgttatagaaatgtttatttttattagatattttgaggagttttaagttttggtgagaagagtaaagtttttagaaggaaatgatggtgagttgtagttttattattaatgtgttttatgagagttaataaattattgaatttttttttatttttaggtttttttttgtaaaatgtggattatgttttatgtattttatatttagatttttatatatataaatttaatattaatatgattagtttaatattataaaagttttttttattgttatgtgtaattattaagttaataggaggaataagaaaaaaaaaagttgatatttagttttattggtaagtgattttttattatgtaagaaggtattgtatttatgtttttcgagtgaaagtatttgttgattttttttttgtaagttttttagttgtttaaattttttttgaattatgaaataggtgtatttgatatgagtaaaggtataatatataaattttatagtatttagatatagttatatttagttttgaagatagagaataaaagttgtgaagaagaattttttgggggttgaatcgtattaatgatggagtaaatgtttagagttataggttatattgggttagttttaaatattaaatttaaaatggtagaggtattaatgtgtttttataaataaattttttatttattaggtttacgttgtttatggttagggatagtattaatggttataaagtaattaaaataatgtttgataaatattattggtaattttaattaagataataaatatttttatttttttttttgttttttttttttttatttttttttgtatattagtaaagtagaagatagagagtatttaaaagtagaatatgtttattaggtaaaaagaaatagggaagagacggtagtaagaggtttgtaatagtggtatatgaaagtattgagttattttaatattttgtattattttgtgtatagatttagattatttgagattgggaacgttgttattgggtttttagtagtagtggtgtatttaggattagggtaatttttagtttaaggagggtttttattggtgcgatggaagtataaaggaggaatattaaatttagatttagaacggaattgggggtaagaaagaataggtagagagggatttgaagatgtttttaatgtttttttagtttttattttagcgtttttcggaatagaggtttttggtttattttttttttttgtttaaagggagaaattttttttaggtttattttggggttgtgaggtaaagtttacgttaaatttagggattttttagttttatgggtttttttaaatagattttttttttttttttttttttttttttatttttttttttttttttttttttttttttagggatagggtttggttttattatttaggttggagtatattggtatgattatggtatattgtagttttaattttttaggtttaagtgatttttttgtttgagttttttaagtagttgggagtataggtatatatcgttattttgtttaatttttaaaaaaatttttatagaaatagggttttgttatgttgtttaggttggttttaatgttttggttttaagtaatttttttatttcggttttttaaagtattgggattataggtgtgagttattatatttggttatatagattttttaattagtaacgaaagtgttagtttagagttattttttgattggttaaaattttatttgaggttaggcgtagtggtttatttttgtaattttttagcgttttaggaggttaaggtaggtagattatttgaggttaggaatttgagattagtttggttaatatggtgaaattcgtttttattaaaaataaaaaaaattagtcgagtgtggtggtgtatgtttgtaattttaattatttagtaggttgaggtaggcgaatcgtttgaatttaggaggtagaggttgtagtgagttgagttcgtattattgtattttattgtattttagtttgggggataagaataaaattttgttttaaaataaaataataataaaaaaaaaatatttaatttaaaaggttttggtttggggtttttgttagttgtgtttttttgatttagttttttttatagttttttgtaatgtttttatttttgttttattatttagggtagttattattggtttggttagaggaaggtaatttagataagtattttgattttgaatgttttatttaaattatttgttcggtttttgatggggatagagcgtttaggatgagattatatatattttatgtgggaagatgggataaagatattgttgttattacgggttaaggttatattagggagattttttagggtatattgtttttttttttagggtagaaaaaggttgtggattttttttttgtggaattaagggagaaattattttttttggttagtattttttagaatttgtgtttggttagtgtagttgaatgtaaatataggagttattttgttattagaagggttatttaggattttgttttgtaattatttttagaattaagaaatattgtagagttagaaaggttttgtggtttttttaatgttagtggtaatagaaatatagttttagaatattatttttttttaataaaaatttattaagtaattatttttaaattttttaaaattttgtgaagttatttatatattttttttatattaatttttaggtaatcggttatatgaattttttatgatatatataaggtaggttttttttttttaaatagttatttttttaaaatgataatttagaaaatttgaagagagagtttgtagtatttagaggttgtgtttaaatagtgttttttttaagtaagtaattatggggagattttatagtggaagttaggtaaggatttggaggatatcgtagggtgaaggattaggagtatgggaaaagttttagtaggaagatagaaaattagatgatataaggtatttgggatatttgggggaaatggggaaggtgagtgatttttggtataggagtttagagtttattagttttatggttttttatgtagtatggaaatggtttttgaaaatagaagaagattgggatgaaaatttaggttgtttgttatggacgtgtgtataacggagttttgttttttgatttgtttttataggtttttttttttagttaattttatttatgtattattttagttggattattgacgattttattatttagagttaatttatatatgttattttttgtaatatatttgttcgtttttatttttggttttttagtaatgtttgggatatttttagagataatttttttttagtttttagatttgtagttattatgtgtttttatttttagataaattttaaatatttttttatgagatttttataatgtttttttttataagtttttattagtagagagaagaattaatatttaggtatgtaaaaaatattttagttttatttaagtttatgtttaagtatttaagaatttaagtgtttagtttagtttaaggttatggtttatgtaaaaaagtaatattagtagtaatattttggggggattatttatatttttaaataggaaaatttaagatatttaatttaaattttaatgatatattaatttatgttttttaggatgattattattaaaaagataaaaaataataagtgttaataaggacgtggagataagggaatatttgtatattgttggtgggaatgtaaattagtatggttattagggaaaatattatgaaggttttttaaaaagttaaaatagaattgttatatgatgtagtaattttatttttaggatatagataaaggattttaaattagtaggttgaaaatatatttatatttttatgtttattgtagtattatgtataatagttaaggtatgaaattaatttgtgttatttagtagatgaatgggtaaagataatgtatgtatatataatggaattttatttaggttttaaaaagaaagaaattttggtgtaagtcgaaaagtgattgaggtaggttttaattaattagaggtttattttgttaaggtttaggatgtatttgggaaaaatacgaattataggagtatttgtgattaatgtttattttaaagagggttttgagaattttaatgtttaaaaagaaagagtaagtaggaagggaaagagagaggaaaaaaaaaaaaaaaaggagggaaggtaggtaatgatataagtggttatatttttgtgagtttgattagttttagtaaatttatattttatatgtgaaaagagggagtagaggaaaaagttatttatgtaaaaataataatattgtagaatttttttaaaagatttattttttatttttatagatcgataattttatttaagttaatttttgtaaaagtattttaattggtttttttgtttttattttataatgttaatattgtttataaatttaagttaatttttttgagtatgagtttttttaattgtaaaatgagaatattatttattttatagagtaatgttaaggattaaatgaagtggtaaatatatagtatttaaaatagtttgaatatatagtagatgtttaataataattttttaattttaatataatttaatttaatagtttttaggttataagtggttttttgttatatggatgaattgtatagtggtgaagtttggaattttagtgaatttgttatttgagtagtgtgtattgtatttaatatgtagttttttattttttatttttttttttattttttttaattttttattttttattgttttttatattattttgtatgtttttgagtatttatagtttagtatttatttagtttttatttataaattaaaatatatggtatttagttttttatgttttaattagaagttgtaaattttgatggagtttaatttatatatattttttttattttttgtttatgttttcggtgttatatttaagaaattattgtttaattaaatattatgaagattttttttattttttttttaagagttttatggttttagtttttatatttaggtttttgatttattttgagtttattttgtttataatgtagggtaagagtttagttttatttttttgtatgtggatttttagtttttttagtattattgttgaaaaggttgtttttttcgtatttaatggttttggtatttttgttgaaaatcgtttgattatatatgttaggataattttttggttttgatattgtattttagttatgtaagatgttataattggggaaaattggatgaaggttatatagaatttttttgttttattttggtaattttttttgaatttataattattttaaaatataatgttaaaaaagtaaagttaatcgaaataatgtgtttattttttaataaattaatttaataagatatttaataaaaattatttaatgtgaaatataaagagaaaagaagagtaggggaaaaataaaatagagtatttaagagttgtagtgttgtattgaatggttatattatttttgtttgtttgtttgtttgtttgtttgttttgagatagggtgttattttgttgtttaggttggaatgtagtggtgcgattatagtttattttattttttattttcgtttttaatttaggtagttttttcgttttagttttttgagtagttgggaatattagtattatgtttgtttatttaatttttttttttttgtagataaggtttttttatgttgtttaggttgttttttaggtttaagtattttttttattttagttttttaaagtgttgagattatagatgtgaaatattgtgttaggtttatttttttaatgtatttttattttttttttttttttgtgttttattttgggtaatttttattgatttattttaaatttattgattttttttagggttgtattatatttgttgatgagtttgttaaatgtattttttatttttgttaatttatttttattttatttttattttatttatttttaaagtttttatatttttgttgaaattgtttaattttgtatgttgtttattttttttattagagattttagtatattaattatagtttatgaagtaggtttattaattattaatattaagggaggaaagggaggatttttattgtatggagaatagaaaagattattattatgttaattattaggaaaagaggtttagatatttttttttattgtattttgagttattgtttatgtttattatgtattggttatttgtttatttgagtttggtgaaatagaatatatttatatataaattatgtgaagtagttttattatttatagattagtagtaagggatagaagaagttttagttttattgtgagttagttttttaaagtttaagaaagttgtttaggagagatgaagttttaatcgtattaattattttattatagtttaaagtgtaagttatagtttaaatttttgattattttatttatattatatgttttaaaaaataattataggaaaatttttttaatagtaattttgtatgaatttatgtgttttgttaatcgagaaaaatggtaagttttaattattttaggaggtttatttgttaaagttaagaataagtatttaggagataggtttatattttttttcgaagataattttgagggttttaaatttaaggggaaagggtagggatattgagaagtatataatttttatgtaagaggagggtaaggaaaaatagttatttatgtttttgtttggtttagttaatttgtattttttttatataagatgatatagataaaacgggggaaggggaataattagatatgcgtttgtggtcgggcgcggtggtttatgtttgtaattttagtatttggggatgttgaggtaggtagattatttggggttaggagtttgaaataggtttggttaatatggtgaaattttgtttttattaaaagtataaaaaaaaaaaattagttaggtatggtggtagatgtttgtaattttagttatttgggaggttgaggtaggagaattatttgaattcgggaggtggaggttgtagtgagttaagatcgcgttattgtattttagttagtatgataaagcgagatttcgttttaaaaaaaaaaaaagaaaaaaaaaaaagatatgtatttgtgttttttgggtaggggcgtgattatatttgtaaagataagttattaatttatattgttatggtaaaattttaatagaaatattttagagtaaagattttgtagtttataaggattttttttgtggataaaatatgagggaggtatgtagttttttattttgtagttattttatttaggaattaaaaagggggaggcgggttttcgtaatttcgtttttagattaattttttttttaggtttaatgagttggagttttaagatttaatttttttttatagttttaaaattatgattaagtgtttatttttttttgataggtatttagtatattgattatgtgttttaaattgattatatgatgcgaagagttataaatttatggagtcgtaagtttggggatattaattataatttatttgtagtagaagtggtttttttggaattaagtttgaataggtttaaaaattaggttgtttttttggtttagtgatagagattattattttagatgaaaatataatagttttttagtgtttttatgtatggttatgtttgttagtagatattaaaataattataatttaagaatagagtaaatagtaatatagatttttttggaatagttgtttttgttattaaaatagaaaaataaattagattaaatttagaggatgaggggaattaagaatggtttgtgaaggagggaaataaatattagttatagttataatgataattataatagtagatattgtagtaaattttattaatttttttgttttaattttttagattataattgattatttttgtatttttttttttgaggaaaaattaaaatgtgttaatttttttaggaaaaaaaatgaaaggtattatattggattatgggagtttggaattttgaattattatttggagaaaagtgatttataaatttttaatattttttttttgttatattagtgagttataaatttttattatattttagttataatatatattttagtttatttgttgtagtagtttggtttattttaattagtataaaaagaagaaaaaataattatagaaaaaaattaaatgaagaatataataattttaatagttttttttgatttagatttatttgaaatgatttttattttttgttttaggattagtagagatgtaagatagaattttatgaaaatatttaatttggtggatgatgttaaattagtagttagcgtgtgtgtttggaatttaaattatataaattttttttgtttattttttattttattttttagagtagagtttgttttttatatattgtttttaagtttatattaattaaattaatttttattattttgaaaatatttatagaaagattaatatgttgaaagttatatttaaatatgggtattttgttttatatttttttgttaatattattttaaaattgtataaatttatattttttgtatttgtgagaaattattatattgtagataaggttaaaatattttgtgaattaaaatatattataaaaagttggaaagaaagattttatttggatgtaaatatatgaaaatagtagtttagatatttaagataagaggaataataattaagtgattataaaggaaattttttattatatgtttggttgttttagatagggaagtttgttttatttgaaggaagtggttattagattagaatgtaattaaatataggattttgttttaaaaaaaaaaaaaaaaaagatttataaaagttacgtttaagttaaattattaaatatttttttttttaattaatgagaagatgtggggttttattaattttttttggtagattaggttaatgaatttattttagaaaaaaaattattgaaaagagtaataaatatataaaatattaaagtagttatgtgtgtaatttatagaaaagaatagaaatttatttaaggatagaaagaagtttagtaaataatgatattatttttttggatagggtaatttgtgttatttttttagataaaatatatggatttggtgatgttttaatttaaatagtaataagatagttttattaataaaatgtttttaatttttaagagcggtatataaaaataattattgataaaaataaggagaggtattttaatagatgtttataaatgattataaagttaaataattaaaatatgtttatagtgttttaaaaaaaggataattgtggaatgatattggttgtatataaatagaatttaatttatgttataattaatgaaattgaaaattttgtttataatagtttttttttatttatgggagatatgttgtaaggtattttaaaggatgtttgaaggtatgtattaaattttgtatatgttatgtttttttatatatataaatatatgatatagtttaatttataaattgtgtagttataggttaataataataattaataataaaatagaataattataataatatattgtaataaaagttatgtaaatgagatttttttttttttttttttgttttttttttttttttttttttttaaaatattttattgtattaaatatttatatttttatattgtgattgattgattattagtaattgaaattgtggaaagtgaaattatcgataagggaggattattgtattatatttttaggaagtcgtaaattttttgagaaaattttgggatgggagataaatatatttttaagaagtttttaatgttataggttatattttttatttttttaaagtatataagggtttattttatttttttggagtttatttaaatttgtagggtaatgggttgtagttaatgaggaatggaatttagtgggatgtaaggggttcggaaataagttttttgaaatatatttgattgttatgatattaatatggaatgaaagagaaagtagtatagtgatgaggaaattatggtgagatttttaggataagaagttattttaaaagaattttaaattattttttttggtgttagaaatataattttaatttgatattttttaagaggttgtaatataatttgaagtatttgaaatggagtatggggaaatttgttttggtttttttaaagaatattatattgggattgtttttaaggatagaataagttattttgtatttatgttggataaattaagaatgtagtgtataataaagtaaatttttaatttagtggaataggaaaaattattaaaaatagtgttgggttaattagtgagttagtgggatagtaaaaagagtttatatatatatatatatagagattatattgaggtagattaaaagtttaaatgagaaggaatttagaattgaggaggaattatttagaatatgtttgttagtaatatatttttttatttttttatgaataattatgtaagatttttataaagggagtttttttagtaatatttaatattgttttattcgtataagtaatttgttttgaattgttttttggggtgtattgttgattttgtatttaatttttagagtatttttttttttttgtaagaaattgttttatgttgtattttttttgttgtgtgtttgttgtttaaatttttttaaattaagaagataagaatcgaagttttatgaaagttattaataaaaatatagaaaaaaaaagtaaatatttattttattaaaaagtggtgagatgagtttaaataataaaataaagaaagaaatcgtataggaaagtatttttagattatattaagaaaaagtaaagaattaatatgtgaaaggtatattaattttaagtattttgtttatgttaaaggtgtttatggtgtagtatgtaaaatttaaataaataaagtatattgtattaattttttagttattgttataataaattagtagaaattttgtagtttaaaataatatttatttattattttagttttttaggttagaagtttaggtaaagtttaattgggttttttgtttaggattttataagattgaagttataagttgattttataatttttatttgaatatggagtttttttttaagtttattgtttgttgatagaatttatttttacgtatgattgaggtttatgtttttaagtcggttattagttagggattagtattagtttttagtgattatttttagttttttgttatatggttttttatatttttaaagttagtaatatagagttttttttatgtttaatttttttttttaagaaaagtttagttttttttaagggtttatttaattagtttatgtttatttataataattttttttttataaggttaattgtagttaaaatataatttaattatagtagtgattatattattaaatttattggttattattgggagtaagttttttaaaatttggttataaattggttttaaatttatggtttagtttatggttataaattggttataaataaaatttttgtagtattgtaatatgtttataatggttttaacgtttaagttggaaggttgtgggtttacgggaatgagggtaaggaatatttggtttgtttaaggtagaaaattatttaaaggtatttttaagttataaataaaagtatgagtaatttatgttttaagagtatgtttttgttgtaattaatttagtttattttttcgttttttataggaatatttttagttaatttaatatttatagaaataatgttaatgattggtttgttattaataaatatgtgagtaaatttttgtttagggtttttagttttgaaggttgtgagatttttgattttttattttatatttttatatttttgtgtgtgtgtttttaatttttttagcgttgttgggttagggtttttttgacgaagttggtttcggtaggttttatttatatttaaaggaaaataattttataaggtatgtataatagggggtgatagatatttttgggggttattttagaattttgtttttttttttatttttttagttttttggttatttgtaatttatgttttttttaaatgtaaaatatattaatttttttttaagggttttttaaagttttattttattatagttttagattaaggttaatattttgtttaaattttgttagtttaaagtttaaattcgtagtgtttttatattaaattataggatttgaagatgtgagaattaggaatttgatagaatatttaattataattgttaatagttatgagattagtttattaattaaaattttatttgggaattaagtgtataaatgttattgaatttttggggatagagatagggaagtatagggatttgatgatatttatagttatttaataaaaaagattaggtggtattttttttatttatatttagttttgttggtattgagaagatatatttaagagaataattaattatatttataggattttttttttattgagatagaatagtaatgaagttattgttattggtgttatttgtattttatttatttatattttatatatttatatagtatatattagaatatttaaattaattttatttttaattattgtatattattattattttttttgagatagagttttattttattgtttaggttggagtgtagtggtataattttggtttattttgtaatttttattttttgggttgaagcgatttttttgttttagttttttgagtagttgggattataggtatgtattattatattcggttaatttttgtatttttagtagagatagggtttttttatgttggttaggttggttttaaatttttgaatttaggtaattcgtttgtttcggttttttaaagtgttgggattattttgtattttagatgtcgattttgttgtgttaattaattttttgatgattgtaatagaatatttgaaattgggtaatttataaagaattaaaatttatttttggaggttgggaagtttaagagtatggtgttagtatttggtgagagtttttttgttagtggggattttttgtagagttttattgtggtgtaaggtattatatagtaagtaggttgagagggttattttaagtatttttttttttttttattaaatttttagtaatttattattttatttttatgattttatttaatattaattattttttatattttttatttttaaaatattatggtttgtttttttatttttttatattgttataatagggattaagtttttatataagatttagaggagtaaatttttaaattatagtattttatttttgtagttttaaaatttatattttttttatatttaaatatatttattttatttttagagttttaaagttttaattttttttagtattaatttaaaagtttaaaagtttaaagtttttatttgtgagtttgagatattaaagttaattatttatttttaagatataatgttgggataggagaaatgggttagaagaaagaagtaataggttttaaggaagtttgaaatttaatagggaaagatattaaattttaaagttggaaataatgttttttgattttatgttttttattttgagtatataggggtagaagttgggtttttaagattttaggtaattttgtttttatggttttgttggttgtagtttatatatggttgtttttatgggttggagttaggtgttttgggttttcgaagttgggattgtatgttggtagttttatagttttggagttttggtggtagttttattgttatagtattattagatatttttttggggaggattttttgtagtagttttaattttatagttttttttagtattgttttagtagaggtttttggtggttgaaggggtgggtcgtttttttatatttgtgggtgtttttcgttaggtggaacgagagatttggaaaagaaaaagatatagagataaagtatagagaaagaaataaggggatttaggggattagcgtttagtatatggaggatttcgtcggtttttgagttttttttatatttattgattattcgtgggtgttttttagagagggggatgtgttagggttataagataatagtggggagagggttagtagataaatacgtgaataaaggtttttgtattatagataaggtaaagaattaagtgttgtgttttagatatgtatatatataaatattttaatgttttataaagtagtattgttgtttgtatgttttatttttagttttaaggcggtttttttttattttagtagatggaacgtataatcgggttttatatcgagatattttattgtttagggatgggtaggagatagatgttttttttttgttttaattgtaagaggtatgttttttttttatattaattttttttagtatagattttttacgggtgtcgggttgggggacggttaggtttttttttttttacgaggttatattttagattattttatggggagaaattttggataatatttggtttttttaggtagaggtttttgtagtttttcgtagtgtttgtgtttttgggtatttgagattagggagtggtgatgatttttaaggagtatgttgtttttaagtatttgtttaataaagtatattttgtataatttttaatttatttaattttgagttcgatatagtatatgttttagagagtacggtgttgggggtaaggttatagattaatagtattttaaggtagaagaattttttttagtgtagaataaaatggagttttttatgtttatttttttttatatagatatagtaataatttgattttttttgtttttttttatagtggtggttttgtttttgtggtagttttttttttgggtttttaggtagtttgatatattttttgaaatttaggtggagatttttatgtttttttattagttttgtattttgaagatttgtagaaatagtattatatgtatgtggatattgttaaggtttattgtttgtgttttttgtagttataatatgagttatatttggggttatttgagttatggttggagtaattaggatgagggaagtattgttttgaggtggtattgggtagtaagtttatggaggatattttaggtttgttttttgaaattattttttttttttagagttttgggtttgtgatggtaggggtagatttgaagatttttaaagtgtatttagtgtttgttttttattgttttgatgaatagtttttggttttattttatttatataattttttttattaattagtttttttttaataattatttttttagatatatttttggttttttttgttgaaaatgtttttttagggttaggttgtaaaattttttaatttttttatttagttttttttttaattataaattttatttttaagttattttttattttttatagttttaatgtaagtagttaaaagtagttatgtagttgtttgattgttttgttgtttagatattttttttgttatatagtttaataaaattattagatatagatataatttagagttaagttttttatttatttattataaggatggtttttattttagtttttaattttttgttttttagatttgagattttagtagaatagtttttattgtttatatttttattgatattttggttttgattatttaaattattataaaggagttttagattttttttagtttttttgattttttttaagtttttattaaaattattttttattattagaattgatatttaaggtaatataggttttttttcgtttgtttttttgagtttttttaatttttatttattatttagttttatagttgtttttatatttttagatatttgttattagtaatagtttaattttttagtattaattttttgttttagtttgttttttgttgtttgtaatagaatgttaaaaattgggtaatttatgaagaaataaaatgtattttttatgattttggaggatgagaagttttagagtatggtgttagtatttggtgagagtttttttattggtgggttttttgttgagttttgatgaggtgtagagtattatgtgataagagggtaaaggggtatggtttaaggtttttgtttttttttttaatgttttatttttaagattttatttaattttaattattttttaaaggtgttattttttaaatattatagttggatttatagtttttttaatattattattatggggattaagttttaatatgagttttagagaaaataaatatttaaattatagtattgtttattttttttattttttttttttttttttttttttgtattttattgtttttgtttagaggttttatttagttattttattttagtttattaggtttttaattaaaattttagttttttagtgattatttagatttattgttttgttgtaatatttggaataataataatttttttaggatagttgttttttatttgttttagttttttttgagaaagttattttgtgtttttttatttttttatatttatagtatataagtgtttgaaaatattttttttaattttttttaaaattatggggagtttaattttagtttttagttagaagtagaaagttaaaatttggttgttttttttttatagagtatttttggttttttttttatttaggaattaaatttttagttaataatgtttatttttaggtatagaagttaagattttagttttatttattatatgtatatttattttatttgaagtttttaggaagaatttttgtatttatatttatattttttaattttttttagtatattgttttatatagtttttttggtggtggttgtatttattataatatatatatataatttattatagtttattggtattgatgttttattattttgagtgaaggatatagttcgtatttttagtattattagtatattttattttttttattttttaaatgtaattgtattaagtattttttttatatgtatttttatttatagtttggatatttgtttattttaaattttatgttgaaatttgatttttaatgttggaggtagggtttaatgggagatgtttagattatgggggtagattttttatgaatggttttgtgttaatgttatgattttaatgtttgttttattttttaatgttattattgatttaattatagtttttatttttaatttgttttttgtttgtttgttttttttttttttttttttttttttttgagacggagtttcgttttgtcgtttaggttggagcgtagtggcgcgatttcggtttattgtaagtttcgtttttcgggtttacgttatttttttgttttagtttttcgagtagttgggattataggcgggtattattatgttcggttaattttttgtatttttagtagagacggggttttattgtgttagttaggatagtttcgattttttgatttcgtgattcgttcgtttcggttttttaaagtgttgggattataggcgtgagttatcgtgttcggtttgttttttttttttaattattattttaagttcggggtatatgtgtagttttgttatataggtaatttgtgttatggaggtttgttgtatagattattttgttaaatagttattaagtttagtatttattagttattttttttgattttttttttttttttattttttattttttgataggttttagtgtgtgttgtttttttttatgaatttatgtgtttttataatttagtttttatttataagtgaggatatatagtatttagttttttgtttttttattagtttgttagggataatgatttttagttttatttatgtttttgtaaaggatatgattttgtttttttatggttgtatagtattttatggtgtatatgtattatattttatttatttagtttattattgatgggtatttaggttgattttatgtttttgttattgtgaatatgttgtaatgaatatatatatgtatgtgtttttataatagaaagatttatatttttttgggtatatatttagtaataagattgttgggttgaatggtatttttgtttttaggtttttgaagaatttttatattgttttttttaatgatgaataaaatttttgagaaatatggggttatgtaaagatattatatttatgattgattggtgtttttgaaagagatggagagaatggaattaatttggaaaatatagtttaggatattatttatgagaatttttttaatttagttagagaggttaatatttaaatttaggaaatgtagagaattttaataagatattttataagatttttatttttaagatatataattattagtttttttaaggttaaaatgaaagaaaaaatgttaaaaaataaaaaataaaaataattagagagaaagattaggttatttataaagggaagtttattagattaatagtagattttttagttaaaattttataagtagaagagattggaggttaatatttaatatttataaagaaaagaaattttaatttagagttttataattggttaaatgaagttttatattgaaggagaaataagattttttttagataggtaaatgttgagtaaatttattattattaaatttattttataagagtttttgaaggaagtattaaatatgaaaaggaaagattgttattagttattataaaaatattataaagtaattatataaataagtttgtaaattaattagttaatattatgatgataggagtaaatttatatatattaatattaattttaaatgtaaatgggttaaatattttaattaaaagatatagagtgataagttggataaagaattaagatgtattggtatgttgtttttaagagatttattttatatgtaatgatatataggtttaaaataaagagatgaagaaaaatttataatgttttttttttttaaaatttgttttttatattaataaattgatattattttttaaaattagtatttgtatgatatattttttttgttttttatatttaatttttgaaatgatttttatgttttagatatatgttttgtaaatagtataatttgaatttgtatttttgtatttaatttgttaatttttgttttttgattataagttaagtttatttgtattttattgaaataaataatatatatggatttttatattattttatattttttatttcggttttttttatgattttaatgattttttttttgttagtttatttttataatttattttagtatgtgtattaggttgggatggtaggtggatttattttaatttttattttgagatgtgtttttagattttgttaaggtttacgttgtttatttttggtattttttatataagaattattgatttaggtttagttatttgtagattttgagatattgttttggttgtttgtatatggtttgtttttggatttaatattttatgtttttatttagattatataattttagatttattttattattatggattttttgtttatttgtatttttttagtaaaacgtttaaaagtaattattaatatttttgaaatattaatttgatagatttttgtaaaattatataatttattgaaaattatatgggtgttttaaattatattttttggataattttatttgtatatagtttgaatagatgttttttatagttagaataatgatattagttaaaattagaggattaatttatgggtagattattttaaaatttattttgaggtttaaaaggaaatatattttgtaaagtaagaaagtatattttttaagatttaattagtaatgaaggtattttaatagtatttgggatttttatatgtgaaaaaaataaattagattataaaagagaggatttatatatatttagtttttgtaggaggaaaggaattatttagacgttgttattttgtttaaaataacgtataagtataaaaatttgtggtagtaaatttagtgtattatttttatatgtgatattaataatttaaggaaataataataaaaatatttttgttttttttgaaatgagtttgttatggtttgtatggaagtttattattgataagtattttgtttttttatttttttatttagttttttttttttgtagttttatagtaagaattataatttaatattgtattttatgtttgtttattatgtgattttttttagtttttgttagaattaaagtttataaaggtagggatatatttgtttttttgattaggttatttggaatagtatgtagtatttagtaggagttaaataattatttgataaataaatggatatatttattgatgaatttgatgtttatataaaggttatttttatttaaataaattcgttatttttatgagttatttgttttttttgttatatgtagagaattattatttaggattttagttgagttttaaatagttggatatttttataattagggatttttaatttttttatttggcgttttatttaatagaagtgtttttggatatttatatttgattttttaaaattatattagtttttagaataatgtttttagatagttttttagtaattttttaaagacgtgattttatatttttattaatgtataattttatttaaattgaaatgatataatattattgtgttaaatattatagagaaagttggttatttttgtatatgttgttttttatttgagttttttttgtgaattattgtttatttattttttaatattttaattaggttatttaatttattgatttgagtagtattttatttttttttttgtgtaatatatgtattgaaaaatatttaaatatattttataattatgttgtttaaattttgtaatgtatattaataaatatttatttgttatatttatttttaagaaatatattaaaatgtaataatttgtattttttttattttattttgtttttttaagtagtatttatgtattttaattttttttatagtttaaatataatatatttaggtgtaggttttttttgttttttttttaaatatagggattatttatagaggaattaaatatagtaatataataaaattgtaagaaggatgttagagatataaaattgttggtggtttaaattatttgtttttagataattagataattgatgtttaaattaatattttatatatataaagatatatatattattattaaaagttattgatttggggataatgttagtggaggaaaggaatggtatgaagggtttttgtttttattaaaatatatttttattgtttaatttttaaattatatataggtattttgataaatttaaaatattgattgtaaaataaaatttaatttttattgaaatattaagaatgttgtagatggtggtaggatgtttaatgtgaaaaaggatagtggtttgtattagaatgatagtagcgaagtttgttttaagtatgtaattttatagtattaattttttatttgtgaaagcgtgtaaaagattgagttttttagtttttaaataaaagtagattttaatttttgttttagttatgtttttttgttttttaaatatttataattatattttagattgtattatattttgaatatatggaaggaagagtaagggaaaaaagagtggttgggttattatttttaagaaatgttgattttttaaatttagatttgttaaggggttaggagagaagggaaagtagtagtttttttgaatttttaaagtgtaatgtttttatttattggtgaagatgatttagttaatatttttatagttgttaatgtttttttaggatattgattttttttagtagaattagtgtgttttagtttagttttatattagaagataaataaaatataaatttaagatttttgtagtgtagtggaggtttttgagggtgttgtaatgagaattttaaatataaagttagttttaaaataatattataattagtagtttttttttttagtatttatttattttttatagtttttgtttagattgttttttttttattgttttttttatcgttttgtataaatttttttttttatattgtattttttgtttatattttgtttttttatgcgttaagttagtagtttttttttttttttgttgttttttgttttttgatattttagataagaaatttgtttttgggtcgggtgcggtggtttatgtttgtaattttagtattttgggaggttaaggcgggtggattatttgaggttaggagttcgagattagattggttaatatcgtgaaatttcgtttttattaaaaatataaaaattatttattggttatttatttggtgtttagtattaggttatttttaagtattattgaattttgtgataacgttgaagatatgtttggaagttttaggaattagaagaagaatacgatttaggatgtttttttttgtgatatttatttaaattttttggtttttatatttgaggtttgattgtagttggggagggtaggagagggatgggaaaaagaaaatggaaagatattttttggaaaagaagataattgtttaagaattgtttattttttttttgttttggtattatgagatattgggatataatataaaaggtaatagattttgagaaaaatgtatttgtttcgtagttggagaattcgttaagtttgtgatttttaataaattatatattttttgttagttttagttattttaattttaaagtttagatagtttttatttggtgggattaatattaagatgaaatgaaattttatatatgagatttattaattgcgtattttgatagagagttataatattaaagttaagttttgttatgtgtttttataggggataaaatagaggttgtgaaaagtagatagttgagtaaagtttattgaattatttaattagttatttttatttttaattataaattttgtataattatttagaggatgttattttgaaaaagataattagttttatagagaagttttggtagttttgaggttattaataattttagttattatagtaataatcgggaggtgaaatagattaattagaggtaaataggttaaaataaagtttatcggagttttgggaaatttttatttattttagagaagaataatgtataatgagtgataaaatatttgattttaaaaatttaaattatttataaatgattttttatttataattggttataaatagaataaaatatttaggaatatagttaataaggtaagtgaagaatttttttaaggaaaattgtaaattattttttaaagaaattagagatgatataaataaagtgaaaaatattttatatttatggataggaagaattaatattatgaaaatggttatattatttaaagtaatttatagatttaatgttatttttattaaattattattgatattttttaaagaatttttaaaaaattattttaaaatttatatggaattaaaaaaagagttcgaagagttaaggtaattttaagtaaaaagaataaagttgaaggtattatattatttaattttaaattatattatagggttatagtaattaaaatagtatggtattggtataagaatagatatatagattaatggaatagaatatagaatttagaaataagattatatatttattagtatttgatatttaataaatttgataaaaataagtaatggggaaaggattttttttttaataaatggtgttgggagaattggttagttatatgtagaagattgaaattggattttttttttatattatatataaaaattaatttaagttggattaaatatttaaatgtaaaatttaaaattataaagattttagaagaaaatttaggtaatattatttaggatataggtatgggtaaagattttatgatgaagaggttaaaaataattgtaataaaagtaaaaattgataaatgggatttaattaaagtaaagagtttttatatagtaaaagaaattattaatatagtaaaaagataatttatagaatgggagaaaattttttaatttatgcgtttgataaagatttataatttagtatttataaggaatttaaatttataagaaaaaatttattaaaaaatgggtaaaggatatgaatatatattttttaaaagaaaatatatatgtggttatgaaatatatgaaaaaaagtttaatattattgattattagagaaatgtaaattaaaatcgtaatgagatattattttatattagtaagaatggttattattaaaaagtgaaaaaataatagatgttggagaggttgtgttggtgggagtgtaaattagtttaattattgtggaagatagtgtggtaattttttagagatttagagatagaaatattgtttgatttagtaattttattattgggtatataattaaaagaatataaattattttattataaaagatatatgtatgtatatgtttattgtagtattatttataatagtaaagatatggaattaatttaaatgtttattaatggtagattaaataaagaaaatgtggtgtattatgtagttatgaaaaggaataagattatgttttttgtagggatatggatggagttggaggttatttttagtaaattaatataggaatagaaaattaaatattatatgtttttatttataggtgggagttgaattatgagtttatagtttttattataggtgggagatgaatgatgagaatttttggatatatggaggggaataatatatattggggtttgtcggaggtaggggatgggaggagggagagtattaggaagaatagttaatagatgttgggtttaataattaggtgatgggatgatttgtgtagtaaattattatggtatatatttatttatgtaataaatttgtatattttgtatatgtatttttgaatttaaaataaatgttggaaaaaatatatttaaattattattatatttattaaaattattatatttattggtataatagtaatagttattttttttagattttaatatgtgttagatatattgtatattaaaatatattattatatgtgttttttttaatagattatgaggtaattattattatttaaatttttagataaggaaaatattttttagtttgagtattttgtttaagattatagtttataatttgttttaatgatatattttagataattagtattaaaatttatataatattttagttatttatattaataagaaaagtatttgagtaaaatattaaaaaaataaaattatataattttaaataatatagtttttattaatttattaaatttattataaggaattagtttaaggattgttgattgaattaaaagagtgatggtgatattttttttttaattgttttgaaattaatataaaatattaatttatattatatattatttatatgaatttagttaataatatatattaattgattatgtataagtgtttttaaaatatttatgatgtttgaaaattagatatatattcgtattttaatgttttagttatattttttttaatgtattattgagtaatttttttaatttttattgcgtaaatagaattttaggtaagtttttgaattaattaatgttggtgattagtaaataaatattttttatgttttatatgttatgtataattaaggatttgaaattaattgaggagaatagagaatttgtattaacgagatatttttttgttattattgttgtaagtatttagataatttgggggtttattatagatatggaaaaagtattttgtataaggagaatttttttatgtttgtttttggttttgttttttttttattatttttagttttatgattttttttttttttaaatttaaagtgtttatagattaatttgaagaattttatatggatttaatagaaatttattaaatgtttaaaatgtgttaaagatatagataaaataattgtttttgttgtgtatgtatattttgggggaggaaatatattaaaatattttttaattaaatattttattagttattatgtattagttattttttaggtgttaggaatgttgtatggaaggaaaatgggtatggattttgttttatggggttgagattgtagtagatatgataaatagttgttttttgtttttttattatgttaagatttgggagagtattttaggtaaaagagagtgtaaggttttggaggatagtgtgagtttcgtgaaagaataagaaggttagtgaggttggaatagaacgggttggttggataattataggagataagattggataagtatatatgtaagatatggtaaggagatttgattttattttaatggtaattagattaaatatttttattttaatattttattgttatattttataaagatatatataaatgtgaaattttttagtgaattttttttgtttttttttttttaaataaatttttatatttttaaaattaaggagatagtatttaagagtagaatttaaggagaagtaaatagaaaaagagaaattaggaaataagaaagttagtagttttttttgatagtaagtggaggaattaaatatttttatattgggttgggtgtggtggttcgcgtttgtaattttaatattttgggaggttaaggtgagagaatcgtttgagtttaggagtttaagattagtttgggtaatatagtgagagttttatttttataaaaattttaaaaagaaattagtcgggtcggtggaatgtgtttgtcgttttagttattaaggaggttgaggcgggaggattatttgaatttaagaggttaaggatgtagtgagttgtgtttgtgttattgtattttagtttgggtgatagagatttttttaaaaaaaaaaattttatattggaagaaaggagaaataatttttatttttatattattaaaggggaaaatacgaaatataaagttgttatttggttttcgttaatagtgatttgatgatgaacggtgtttttttagaatataaaggtgttttttgaacgtttataggagcgatatttaattcggattatagagggtgtttgtgtttagaggatattaaatttgagtttttgtatgtattatataagttttcgtttaaattattatttgtaggtttattttttagttttatttttattgagaacgtagagttatttgtacgttttttgtttttggaaacggaagaaattttaattatatgatggttttatgttatttagatttttttttttagtttttggtatgttttaatttcggaggcgattttatatagatggtaatagtattcgtagtttggaggttttttattagtggttaaaatttgatttaatagttttagtcggttttttttgattttagttttttagatgttttttaatattatttttatttttttttttttatttaggatagtcgtgttaagaaatgtttaagagaagggtgattttggaaatgttttgattttgggaagattttttaattattttatatggtaataagtatagtgttgataggtgtgaggattgaagtgggagattaaagaggaaaagttacgaatgagggtgtggggggtagttaagagaagtttttaagggagtatgatttgtgtaaatgtagattttttgggtattggaagatttttggggataaatgttaagaagatattaattttttttattagtattttttagaatttatgttttgtgggtagttatatgtgaatattagaatcgttttttattgttagggagatttaaggtttaattttgtatttaatttggaaataaaaaaaaatgtatatgatgaaattattttgtagttttgtttgtagtagttttagttattttaaatatttttttaatatattattttttttattaattgttattatgtttatggtatttattattttgatatttttataatggattatgaggtttgtatttgtattgatttatttatgtatttgtttttgtttgttttttagagatgcgggggggttttattgtgttgtttaggttggttttgaatttttgatttttagttatttttttgtttgggttttttaaagtgtttagattatgggtatgtatttagttatatttttaatttatataaatagagatggggagaaaaaataaaaaattttaaagtatttttttttttgttttatatagttatttttgatattaggtatgtggagattttttttttatattaagtaattttttagtagatatcgggtttttttaaattaatttaattttgatattatttatttaaaaatagtattagattttatagattgagggattagttatgtaaaattgttttttttttattttagatgttagttgttattatttgtatttttgattatttaattatagattggaggtttttataaatttttttttaggtttaattaatttgttagagtagtttaaagaatttagggaaatatttatttatatatattggtttattatataggataagataaaggatatagacgaatagattgataaagaaaaataaaatatataggataaagtatgggggaaagagtgcggagtttttatattttttttaagagtttattttttaggtattttttcgtgttttgttatttggaaattttttaaattttgtttttttgggttttaatggaggttttgttatgttagtatggtgagttgattaaattattggttattggtagttaatttaatttttagttttttttttttttttagagattgtgagtgggtgaaaattttaattttttaattttgttttggtttttttggtgattagttttagttattagttattttattagtatgtaaaagatatttttattattttggagattttaagagttttaggagttgaagggtaggaattagggttagaaattaaatatatattttttattatattataatattatatatattagtttgggttaattagttgtattaattatttgtgtatgatgtgaagtattttttttagttataaatttattttttttaaattattaggtaggaagttaaagggaaaattttttattttatttttggaaaattaatgaataaattaaattagtaattatatgttatttttatttttgtaaaaatgatatagattttatatgtttgttatgaataatagatgagttttgtaatgaagagttatgtatgttattttttattagaatgagtatggttttaatttttatgtgattattaaaagagaaatatggtttttttttttaatttagagtttatttaataatggtttatgagtttttgtgatttttttttaaattaaggtatattttattgttttaatttatgtttttgtgttttgtttagtgatttattatttttttatataagagattttcgatttagtaagtttatttataaataaatatttttatttttggaatagagttgttaaaagtagaggtatatagaaaaaaaagtttgtgtttgagagtttaggagagagaggagttaaaagaaatatttattagtagttaaatgatttggtttttgaagggattcgtttttatgaataagaatacgagtaggtatttttattggtattttttttttatttgtaggtatttgagatgattgtgttttttaaagtttttgtgatgttagatgtatttaatattattttttataattgaggatcgtagtttttttttgtgattttttggttttattgtgggaagatagttaaaaaattattttttaaagtaggaaataaatttttttttatagaattagtttttttttttttgcgtttgtggtttttattattataaaagagagtattgaagtttaaagaaagtattgtgtattttttttttggggttttgatgttttgtttatggtatttatgtttttaaaattgttttatgttattatgaaattgtttttacgtggtgtttatttttttttttttatttatatttttaatatttttagaattagagagagagagatagagaaatagagaagttttgattttaatattatttttttttatagaatatgtggtattcgtattttgttagagaagataaatgcgttgttttttagattggtaggatttatgggtattttatttttataatatgaggttgtatgtagatagtgttttttggtattaagaagttatgtgagttatattatagaggagaggaagttaggggttttaaatattttaaagaataaggaagttaagttatatttagaagttaataagaattttggggagagaggaagttaaaatatagaaatgtatttaaaaaaaagtttaggatgtagaggaggatgggattattatgagatagtcgtttaatgtttatgatagtttttgttatagtaagttatatttttagatagagagagaaaaggttatatgtatatttattttgtatgaatgagtattgttgtttgatgaattttatttttttttttttttttagtttttttatttttattgtaataataagattgttggtgatgtggttatgtagagtttttgttttttatgttttttttatttcgattttttatttttttttatttttgttttttttggttttatttgggttttttttaagggttgttttttatcgggtagttagttatacggttattattattttgttatttatatagaggttttttatttttttgtgattattttgatgagattttttttttttatggtatttattttggtagtagtaagtttatagtttagagtaagaggattatttgttgggatgtataaaggaatttaaattttattgaaatttgtgatttaaattattgtttatgtttaatagaaatagtagtaataagatcgattgaggaattattttacgtattaaaatagaagatttattattttgtgggaggtagtagttatgaatttaaattaagtttagtagtagtatattttttagcgtgtttagaatatgtatagagagtttaaattaaggcgtaagagtttttaatttttttatttgtatggttaagttttatttatgttagtgttggaagtattttttttgtattttattggtttttcgggtatttttttttaatgtttttatttaaaaacgtttatatagagttttggtttttgtttggggatgtagagaattggaaataatgatgtttttttgtaatatgaaagaaattatataaattgtaaggtcgtaattttttttaatttattatagagttgggattgagtttttaattagtttgaaatttaggaaagttgttgtttgagtgtttgtttatttaaggtaggtatagttgggtattggtaagaagaatttagttggaattatttaaaaattgattgaggttaaatgtgggttggaaagagtatagagttttaggggtttacgagtatagggcggtttatatttttttgtaagtttcgtattcgggaatgttagtgggtgtttataaataaaaaatgggagagttttgagaaggtatttcgtatgttttttaaggaaaagaataaatagaagttaaaggttttatatatcgatgtgtattaaatgagttaattaatagaatataagggaagtaaagattttattattttatgttgagagtagattatatatttaaattttatttcgtttgttttttgtttgtttgtttgtttgtttgtttgttttgagatggagttttgttttgtcgtttaggttgtagtgtagtggtgcgatttttttttattgtaattttcgtttttttattagtagggattatagtcgtatattattatattcggttaattttttttttgtatttttagtagagaaggagttttattatgttggttaggttgggtttcgaatttttgattttatgtgatttgtttgtttcggttttttaaagtgttggaatatacgtgtgggttattgcgttagtttttttcgttaatttattattatttttttttaatatttttaaatttatttaatttattaacgtgatatatgttgatattttattaaatatgtttttatttatgatatatttaataatatgtgtgtagtgttataaaattttaatttattttataaatatttaatattaattgagtgttaggtatttttttatgtatttaaatagtagataggtatggtggtcgatatttgtaattttagtattttaggaggtcgaggtaggaagattatttgagtttagaagtttaagattttgtggttttagaggttgaggtgggaagattattggagtttaggaggttaagattgtagcgagttattattgtattattgtattttagtttgtgggatagagggagtgagattttgttttagatgaaagaaagatagagagagagagaggtatagagatgtatatgtatataacgattatatcgtagggttgtttaaattatttattttggttgggggtttgtgttttaaattattattggtacgttatttttgtgtggttggtttggaaagttttatattattttttttttttttttttgaatttttatattttttttaatttttattattttttttagagtttcgtaggttgaggtgatgtgagagaggaagtagaagcgaaggttacgcgaggaaagtttttcgttaaatttgggatttttacggggatttagtttagaggaagttgagaaaattaatttaaattacggtttcgatcgttatttggcggtggaagtttatattatattcgcggagtaatggttgggaacgttgtataatagagcggggtttaaattttaaattaagtttttgaattttttttatttggaattttatttgatgattagtttagtatcgtaatggtgtttttcgtgttgacgtgaaaatttagtttttttttagtttatttttcgtttattagggatgtaaaattttagttatagatgatttacgattttgattttttttttatttattttattttttttttttttagtatattttggggttaaattttaagaggtatttatgtatcgttgggtcgatgatgaaaatgaagaagttttttgatgaagcgagatttcggaagtgtagttttaggtaaaattttgagcgaattttttgttgttaggatagtttataggtttttatttttagaaattacgtaagtatgagtagttaacgttgaaaagtagagaatgtggttttttggcggattttagagggagattaggaaatttttttatttataatttattaagagtagtttttttaaattgagtataaagtttttaaaggttagtagagataagtaaggatttgtagtgagttgtagtttattattcggattagaatataaaagataggagattttacggtttggagatttattagagtaaaatttgttattttaggtagggaggagaattaggcggaggtttgatatggtgaggttttgttttaagtggagaaggtgtataaatttaataattttgttattgttttgaggatgtgatgtggtaaaggggataaggattggatagattgttttattgatggaagttggtaataaataaggtaaattaaaaaagaagttatgagatttagggaattgttgtataggggatatggttgtataatattagtatagtaatttattatgtatttgtgtggtagatagtggttgaattttggagacggaaaatattaataagatacggagttttgtttattatttaggagatatattagtaaataaaggggtatagtagaaatgtgtgtaaaattaggatattgaagttataaataattaggaaaattttttagtggaaatgatatttaagttgatcgagggtatatggagaatggtttttaagtttaataaagtatgagcggtttggatatttggataggtttcgagggaagtgaaagtttttcggaattggtaaaatgggtgggtgatagatgaagtagagggttagggatggatgttttatatattaggttaaggatttgggtttttgatttgtagttagtaggattagtatgtagattgatagtaagggaagggttatgggtagttttacgttttagaaagattattttgatgggaagagtgggttagaggagtataaaattgaaagtagagaaagtagcgtgggtaattgttagagtaatatagattagatatgatggggttcgaattaaagtaggattagggatttagagagagggttagagatatgtgagggagtagatgtaatatgatgtgtcgttatttattgtatatgggagagaggagaaggcgagagtagaagatgtttgggagattaagtggttagtaattttagttattaagaaaggatagtttaagagaatattttatattagatattttgtatttgtagggtttgtgggttatttagatgaaattttattttgtgtggtagatggaataatgtttttaattgttatttttgaaagatttgaatttatgaaatttgtgaatttgttattttatatggtaaaagggattttgtattagtgattagattaaggattttgagatggggagattattttggattagttaagtggttttgatataattatatgggtttttttaagtgaaagaaagaggtaagagaatagaagaaggagatgtgatattagaagtaaaaattagaggaaagtgattgttggaagggggtattagtcgaggaatgtagttggtcgttgtaagttggaagaggtaaaaatagattattcgttaaagtttttagaaggggaatatagataagttaatattttgattagttttgtataagtgttaaaagaaaaattttgaataaatgaaatttattttgatttatttgagtaaagtataatttatgaattgggtagtatttaggattagaagaggtatagagagttttattgagtaataggggtaggtaatatttatagagagaaaaaggaagtggtatatagaagtagtttgtttatagtttagtatttgttttatttgattatggtttgattagttggtaatttgtgattgtttgaagtttggttgttgtgtttgtttgagatttagttatttattataagaatatgtttttaagttagggtataatttttttatatattaagttagattttagtatattacgtaggaatttaaagtatagaggtcgttttaagttaaatttaatttaatttaataggatttattttaggtttataatttttagaattgtttaataataaatttttgttgttttaaaatattaaattgtggtaatttgttatagtattaataggaaattaatatattttgtaattacgaagtaatatagtttaaattttaggtttggggattatatggatttgagtttttattatagttttatcgttttttatttatatgaatttgcgtgttttaattaatttttttaagtttttatttttttatttgtaaaatgggattatttattagaatttttgtttggaaagaggaatggggaggtagtgtggttagttgttttgtataataagttttgtagaaatatagatgttttttgattttaggtgggtttgtgttttgataaattgtaagttgaaaatgtatttaatatttttaatttattaaatattatagtttagtttagtttatttttaatatgtttagaatatttatattagcgtggttgattgggagttgtggtttattattgttgtttagcgttaggtgagagtgttatattatatattattagtttagagaaagattgatattttaaatttgaagtatattttttttagaatgtgtattgtttttacgttattatagttgaataattttaagtggaattattataagttaggaattatttgtatttgatgttttaaattatgttatgtataatttttttaaaaaaaagataaaataattttaaatattaaaataggaaaattttaaaaagaaaaaagatatttttttttttttttttttttttttttttttttttttttaggtagagttttgttttgttatttaggttggagtgtagtgatatgattttggtttattgtaggttttattttttgggtttatattatttttttgttttagtttttcgtgtagttgggattataggtatttattattatgtttagttaattttttatattttttagtagagatagggttttattgtgttagttaggatggtttcgattttttgatttcgtgatttgtttattttagttttttaaagtgttgggattataggcgtgagttatattttttattttttaaaatgaaaatgttgatatttaatttttaattttttttaaaaaagtaattattttgtttatgagatttatagagaattttatatagttaatattaaatatatttttatattagaatttgtttaatataaaattaattatttaggttaaaatgttaatattttttcgttaaattattattgtaattgtgtaattttaaaatgtttaggatattgttaatagaggaaatagaaattgattttttagtataatagttaaataaaattgattatataagattttggatgtttgttatattgttgatttaaaataattttaaataatttaatgtatttgatggatagaatgtattaagaaattaataaaagtaatttattttttatttagttatataagttaagtaagaaaatcgtaaatgttgatatttaaggaagttttttaagtatagaaataaattttgatagattattttagatttaggatatttggaaaataaattagattgtttttttggataatttttaaagaattatataattatgatttttgaattttttattaatggaggttatagtagtttaaataatttgaaaagtggggttggtttttaaataatatggagggtttgttttagaggaaatatgtaatacgataggattttagaagtacgtgttttaaggtataaggatatgtatttttggtgatagaggatgtataaatattgtgagtttaaatatataggttatttgtttaagaaaaaaagatattaggagtataaaaaggaattaaatgtaagtgtaaatttataataaatttaaattatatgaggtataaattttaaataagtgtttaagtagttgaaatagtattattttatgttggaaatttgaaagggattaaatatatgatatagagtttatatttaaaaattttatgtaggtattaaatagaaaggatatagtttatttgataattagtagaataggtagttatttaaagaagtgtaatttaagttaatgatgtatatatatgaggtattagaatacgtaatttaatggttatttatgataaaatgtttagaaaatgtaaatagagaggaattgttttaatttgataaagagtatttgtaaaaaattttatagttaatatagcggtgaaagattgaaattttttttttaaagatcgggaataaagtaatgatgtttattttcgttatgtttatttaatatggcgttggaagttttagataatgtaatgggcgagaaaaaaaaaaggcgtgtagattttaaaggaagaaataaaaatggattaaagtttaatatgtaaaatataaagttataaaatttttaggagaaaatttttaggatttaggattaagtaaaaagtttttagatttgatattaaaggtataatttataataggaaaaattaataacgtgtaattattagtggtttgtttttattaatttgtatttgaggtttatggggatattttgatatttagttttgttgaaaatgttaagatgttgtattaaattatattttttattttgatataattgttgatttatagatatttgtaagaaatgttatagagatattttatgtatattttatttagttttttttaaggataatattttgtaaattatagtaaattattatagtttggatattgatattgatataattaaaataaagaatatttttattattataatattttttattttgtttttttgtagttatagttattttttttttatttttatttttttattaatatagtaattattaatttttatttttatagttttggtattttaggagtgttatgtaagtggaattatttagtagataatattttgtaatttttttttttatttagtataattttttggtgatttatttaggtcgtggtgtttgtatttagtttgttcgtttttattgttaagtagtattttttagtatggatatattatagtttgtttttagtttttgtttgaataaagttgttatgagtatatatgtgtagatttttttttgaatataagtttttatttttttgggataaatgtttaggagtgtaattgttgggttgtatggtggttgtatgttttgtttttaaagaaaatgttaaattattttttagtgtggttgtattatattatatttttagtagttaaatgtgagtgatttattttttttgtatttttattaggatttggtattgtgtttattttttatttttagttattatgataggtatatagtaatattttattgtggttttaatttgtaattttttaatggttaatgatattgtatatgtttttatgtttttattttgtatttatgtattttttttggttttatatgtattttaaaatagtttttattagttttgtgaagtattttaattgtagtttaataggaataatattgaattataaattgttttgggtagtatggttattttgatgatattgtttttttttatttatgagtatgtaatgtttttttatttgtttgtgttatttttgattttattgagtagtgttttttagttttttttgtggagattttttatttttttggttagttgtatttttaggtattttattttgtttgtggtaattgtgaataggattgtatttttgattttgttttaggtttgattgttgttggtgtatagaaatattagtaatttttgtatattgattttgtattttgagattttgttgaagttgtttattaatttaagaagtttttgggttgagacgatagggttttttagatatatgattatgttatttgtaaataggaatattttgattttttttttttttatttggttgttttttattttttttttttgtttgattgttttggtaaggatttttagtattatgttgaataggagtaatgagagggggtatttttgttttttgttagtttttaaggggaatgtttttaggttttgtttatttagtatgatgttggttgcgggtttgttatagatggtttttattattttgacgtatgtttttttaataattagtttattaagagtttttaatatgaaggagtgttgaattttattagaagatttttttgtatttattgagataattatgtgggttttgtttttagttttgtttatgtgatgaattatatttattgatttttatatgttgaataaattttatattttagggataaagtttatttgattatggtagattggtttttggatgtgttgttggattcggtttgttggtattttgttgaggattttttgtattaatgtttattaaggatattggtttgaagttttttttttttgttgtgtttttgttaggttttggtatttagatgatgttagttttatagaatgagttaggtaggagttttttttttttaattttttgaaatagttttagtaggaatggtattattttttttttgtatatttgatagaatttagttgtgaatttatttggttttgggttttgttttgttttgttttgttttgttttggtaggttatttattattgatttaattttagagtttattattagtttgtttatagatttaatttttttttagtttagttttagggggtgtatgtgtttaggaatttatttattttttttagattttttattttatgttatagaagtatttataatattttttgatggttgtttgtatttttgtggggttagtggtaatattttttttgttatttttaattgtgtttatttgaatttttttttttttttttttttattagtttagttagaagtttatttattttattaattattttataaaattagtttttggatttattgattttttgaattatttttgtgttttaatttttttttatttagttttggattttggttattttttgttttttgttagttttgagattggttggttgtgatattttagtttttttagttattatgttaggttgttaaattgagatttttttaagtttttgatgttggtatttagtgttataaattttttttttaatattgttttagttgtgttttagagtttttaatgtgttgtatttttgtttttatttatgttaaagagttttttgatttttgtttgaattttattatttttttaaaagttatttaggagtaggttatttaatttttatgtaattgtacggttttgagtgaatttttttgttttggtttttaatttgattgtgttgtggtttaagagatttttttttatgattagtttttttgtatttgttgaggagtgttttatttttaattatgtgatcgattttagagtatgtgttatgtgataatgagaaaaatgtatattttgtttttttggggtggaaagttttataagatgtttattaggtttatttgatttagagttgagtttaggttttgggtatttttgttaattttttgttttgatgatttgtttaatattgttaatgtggtgttaaagttttttattattattgtgtgggagtttaagtttttttgaaggtcgttaagaatttgttttatgaatttgggtgttttttttttggaggtatatatttttagaatatttagattttttgtcgaattgaattatttattattatgtaatgtttttttttattttttttgatttttgttggtttaaagtttgttttgtttgaaattagtattgtaatttttgtttttttttgttttttatttgtttggtagatttttttttatttgtttattttgattttatgtgtgttattgtatgatatatatgagttttttgaagatagtatattaataggttttggttttttatttagattattattttgtgttttttaattggggtattagtttatttatatttaagattagtattgatatgtgtggattttattttgttattatgatgttatttggttattttgtagatttgtttatgtggttgttttatagtgttattggtttgtgtattttagtgtgtttttgtagtggttagtaagttttttttttttatatttagtgttttttttaggagtttttgtaagataagtttagtggtaatgaaatttttttagtatttttttttttgaaaaggtttttattttttttttatttttgaagattagtttggttagatatgaaattttgggttgaaattattttttttaagaataataaatgttggttttagttttttttggtttgtagagatttttttgataggtttattgttagtttgatggattttttattgtaggtgatttggtttttttttttagttgttaattgttttttttttattttaattttggagaatttgataattatgtgtttttggaatgatttttttgtgaagtattttattggggttttttgtattttttgtattttaatgttggtttttttagttaggttggggagatttttatggatgatattttgaaatatgttttttaagttggttttattttttttattttttttaggaatattaatgagttatagatttggtttgtttatataattttatattttttagaagttttgtttttttttttttatttttttttttttatttttgtttgattattttattttagaaagttagttttgaagtgtggagatttttttttttattgggttagttttgttattaatagttgtgattgtattatgaaatttttatagtgtgttttttagttttattaaattggttatgtttttatttatattggttattttatttattagtttttgtattgttttattataatttttagttattttggattgggttttaatgtatttttgtagtttaatgatttttatttttatttttattttgaattatatatttgttattttagttattttagtttagtttagaatttttgttcgagaggtgatgtggtcgtttggagaatagaagatattttggttttttgagttgttaaggtttttgtttgatttttttttatttttgtgggtttatttttttttaatttttgagattgttgatttttggatagtaaagattatttaattttttttatttattttatttattttatttgatgattttgagggtttgattgtggtataaggtggatttagttaattgattttatttttggataattttatttggttagtattttatttttaatttttggattgtatgttgtaattttttgggatttgtacggggttttgattttgttttttgtttttttagaattaggaattcgttgtgatgggcggggggtgggggaggtggtaggagtggtgtagttcgaagtgtttttagattattggttattatattttaatgagtggtgttagttaaagtgttttatagtatagtgataggaggatttgtttttgtttgagtgtattagtagtagtggtagttgaagttgtagtagagtattagtaggtgtcggggtgtttatttttttgtaggtatttattatagtggtagaggtaatgtaattgtaggaaaggaagggggttttttgttggtaattgtgtgtgtggttatataggaagtggtgttggtttaggggtaaggtattggtaggtgtaggtttgcgtgttttttttgtgtaggagtggttatttagggtgggggaggattagttgttttttgtatagtgttagtatagggtgggatgatggagggagtggggttggttggttttgtgtttattaaggttttgtttgtaatggttgttaggagggaattggtggggggtgaattatatttttatatgttggtgaggtaaggaaaataaaatttatttagtagatatgtattagtaaaatgatgtggggagttgttgtgggtttagaggaagttgtagtgtggggagggagtatgtaggttggtgtttggttataggggttttttcgttggagttttttatttattggttagttatggtttgttagtgtagaagttatggtgtaggtttatagagtatttgaggttgttttgtaagtagatgtggttaggttagggttttaggagaggttagaagattaacggttgtttaggtagaattagatttatttgatgggtaagattattttatagattttaggattaatagtttttttagggttaatgttttttatgggagtaagttgagtttagggaaatggttatttttggttatgttttattgtagatgtttttgtattgaattttttaggttttatattcgttggtttgttatttttacggtttttttaagtagttttttttgttaatttaagtgtttatggtggttaatgggtttttttttgttatggttgtagaggttatagtgatagtgggttgttttttgttagtttaatttatttatttttttggagttattggaggataggaatgagtttggatgtgttgtagttttatgtagggtttttagtttttttttattttagtttagtttttgtgttttttttttgtttattttaggtgttttttgtttgaatatttgttaggagtacgttagttatttgggttttttattgagaattgttttatttggttgtatttagttagcgattttgttttttttttaattaagatatattttaataaaatttgtggatattaaagaaaaagaaaatattatttggatatttagtaaaagtagtaatgatttattaataattagattattattagattttttgatagtagttatgtgaaaatgtagtaattttttaagatatttaagagcggaaaatggaattaagatttttatagttataaaattgattttcgattatgaagtgtaagaattttttggtgtggattgtatatgtcgttttaaaatttatatgatgaaatcgtaacgtttaaggtgatagtattaggaggtgacgtttttggaaggtgattaggttatgagggtgtagtttttatgaatggtattagggtttttataagggagattttagatagttttttttttttttgttatatgaggttttagtgagaagatgttgttagtaggtttttattagaattttattaggttgatatattgattttagatttttagtttttagaattgtgaaaaatatatttttgttgtttttaagttatttagtttttggtagttggttatagtagtttatataaattaagatatttttttaagtttttttgaggtatttaggagaaatagttttaaataattatgatgattatattagtagtttataatttttttgatattaggatttttttttatttataaaattgttgagaatattaagaagttttagtttatatgggttatgtaaagtgatatttatattaatttatttgttattaaataataataataaatttattatatgttaatataaataatatatttttatggaaaatagttgttttttttagtataaaaaaatagtgaaaaaaaaggaattattttatatttgtaaaaatttttttaatgtttggtttaataaagttagtttggttatatatttttttatatttaagttgtaataatatgttgttttggttaaagtataagaggaaaatttggttttatttttatatatagttgggaaaagaaggaaagtttttataattattttagttatcgtaattgtttttttttgataagatattaaaatttaagaaatggtagatttttaaaggttagttgtagtgtggaatttgaaattttatatattaattttttatattttgttgtgttaaaatttattagtttatttttaaatggatttttatgtatgattttgtaatattatgtattgattatttgtaaattattgatttatgggtttacgtagatttttaaaatgttgatatattttattaaataatattttttaagttatatttgttaatattattattaattttattagaaatatttttaagtagtgagaagttgtggtatacgtaagttttttaaaattttaatttttttttgaaattttaatttttattgttaatattattttttttgatgggataggtttattttgtttatttttgagaaaatttttattaaatatttaagtttgaataattatagtgtgttttttagttatttttttaaggaaaatgatgatttattaaaaaaaaaatgtttaattttatttataatttatgtaattatataatggtttttttataggataattgtttttttattagtatgtattagaaatgttgtttatgtttttatattgattattaaatagatgtgtgtttgaggtttaaaatttagtaaattaatgattttattgttttattaaggttattggtttttgtttttttttttttttttttttattgtaagtttatggcgagtgaagaatatgatttatttgtatagtttgtgttattattttgatttgtgtttaggtattaatagttttacgtgattattatagatttttgtattaatatgtaaataatatagtgaaaaaggtaaataatattttagtattagtataaaaatagtttgattttataggttttttgaagggttttagggatttttaggaatttatggattatattttgaaaattattatatgatagggatattaatataaggaatgatggtgagtattaaatatatttttatttatagaattaagattaataagggagtaagtagtttatgtaatggtataggattaattaatatagatatagtttaattagaaagcgggggagaatataggtaaaaagggagaatataggtaatagggagaatgtaggtaaaaagaattttaatcgtttttagtagttattttggtggttgtgtatgagtgttattatttttagattgttgtttatgttaatttaggaaaagtaaataagtatggatattttaattgtgtttgtttttgtgtttttgaaaattagagtttttggtataaaagaaaggagatgtagaagtaatatagagaagattgatttttttttaagatggagtattgttttgttattaggtcgtagtgtagtggtataattttggtttattgtaatttttattttttaggtttaagcgttttttttgttttagtttttcgagtagttgggattataggcgcgtgttattatatttagttaatttttgtatttttagtagagacggggttttatcgtgttgtttaggatggttttaattttttgatttcgtgattcgttcgtttcggttttttaaagtgttgggattataggcgtgagttatcgtgtttggatgattgatttttttaaatgtatatatgtataaatgttttattgttattgaataggttggatataatgattatttttatttatttaggtttttttattgtttttttttttgttttttttttatgttttgatcgaaaaattatagaatgtttttgtgatttagttagttgtaggttttttttagtaggttcgaatttaagttaaggttttgaatatttttaggtattgataaacgtatttaggttgtttttttaaatattgaaattttgttttagttttgagttaggttttttaaatttttatataagttttatattttgattttttcgttgtagatatatttaggtagaatatttttttttttttgttgtttgtaaggatttttgaagttttttgtaggtaaattttttaaataaatgttttggattgattattttggtatttagtgtttttttttttgaattttaatttatattattttagaatggttttaggaatttttttgtggtaatttttttgacgttatttttgaggtgattttagtagcgggtttagtgggataaaatattttaacgttggattatagttttaaatgttattttttattaaattaaattagggatttttggaaaaatggttatttttaggtttggttaagaaatgaataagatgaattagaaatatgttgttattttagataataaagaaattattaaaagaaatttgcgttaaaagaatttagttttatttttagttatttgaagaagtttttatttattaaaaatgtaggatataagttttaataagtataaaaattgtaatagagtaaaatttattaaatatttaaatttttttgtttataattatttaaagaatgaaaagtaaaatttgattggttatttgtaggttttattaatagtaggaaattaatttgttaatttgaaaattggtaaataaaaggagagttaaatattgattttgtttttttattgtattattaagtagtttattagtaagtggagggaagtgtttttttattagtaaatgaagggaattgtttttttgtagtattaataaagtatataaatgaagaaaaaatgatagaatattattatttagtaatttttaataaattaatagatttaagtaattagtattaatggttgttaatattataaaaagaaatagttggaaattatgttttttatggtgaaaggttataatattacgtatagattttttaaaggaaaagattgaattagagtttgatttagtttttgtatttagatgttaatttgcgggaggtatagaaggtagaggatgtgttatattgtattatgtgtacgtagttagtaaaatttagagtgtgggaaattttataggttaaatggattgagttttttaatagattaattataagggggaaaaaaaggttgaagggggagaaattagtgaagtatgagagacgtaaaagataattaagttgtggcgtttaggaatatatatttgggggattagattataaagatatgaaagaggttataataaaattaggatatggttattttcgaggggaaggagaggttttgattggtttgacgtatagagattttcgttggagttggtaaagttttgttttttgatttgattataggggttttttttaaataatttattaaaatgtatattttttgtatttttattttatttgataataaaaggtttttaaaaatagtgaaaaggaaatagtgattatttgagtatttgttttttgaagattgtggagattgtagttggaagatagaaagttttggagattatgatttataggagtagggttggattatagaaaagtaaatgatttggggttggaaggagtaaggttttaggggagtttttggataatgtttttggtaatggggattaatgatgtatacgtagaagggagaagggtagatgggtgggagatgtatgattttagaatatagagttttagaattagttcgggtttttttaaggattagggaagagagttatttttagaatattgattttatgaatgttttttattttatttagggtttagattatttattattattttaggttttagagagagaagttttagtgaggattttagtatgattgagggagtagaatagtttttgagatttggaggtatagtgatgaaggttttaggaggtagttttattattttttatagtcgttttagagatttaggggatagttttatttagatagtagtaattttatttttttttatttttatgttatttttttttggttaaagaatcgggagaatgatttgttatttaaagataaggaaaaagagatattattttattattagatatttgcgtttttatatattttggaaagaaatcgagaaaagaatggattgttttaattaggatttaatatgattatttcgagggaagaataaatggttggtaaggttagtattttttttgtttattttatttttagttttagaaaaaaattatttcggtgatttttgagaggtataattagttttttttgttttagattattgacgttagggaaggtgggagtggggaaggtttgggataggtggtagggtattttttataggtttattatttttttgagtttttagttggatgatgatttttattagaaggaagattagtttaagtaggaaggttgtaatgttatttagtatttttttttaagaatatttagattgagtttttatgggaaataggtttttaaattagtaaaaatattttaatatttaaagtatttttttggaattttagaatttgtattagatattaaatttaatgttagttagagaaaaataaataaatttagaaaaggtttttcgaaattaaagttggtatttatggagttattttttatcggttatagatttttatagtttataagaatgttttttaaatattaagattaaagaattagaggatattagtttatagggttggaagtatataatgaggtgattagatttttttattttttggaagatatgaggatagatatttgttatgtttttttttattttaatttaaggattttggtttttgtgattgttttagattaagggaaagaataatttatgttgtgattaagataaacgtagaagtgatataggttttgtattgagttagtatagttttgagttaggtttagagagtattagaaattaatttttattttattttatagaaatagggtttagtaggttggagtgatcgataaggtaggtgtagatatgtttaagtttaggagttatttttagtattattatagtttgaaaggtttagtttttatttttgatagggttagtggatatgattttagttttttttttttgtttatttaggaattatttgattttgatattttttggatagaagtttgttatagagtagtgtagtagattatgttggtgtaggagtggggttttttttgggtatattgttatttttggttgtattaggaagggaggaaaaatgagatatcgtgaaagaaaattattaagttgggataggagattttttagggattattattatgtttaattttttttttagattatttaagtgaatataaagtataggtaagttttagtttttaagattagtaatagggtatgttaatgtttgttaggaggatttagattttttgaggtatttttataattattgtttttttttgagggtataatagttttcgaagtttttgagaattttgggggtttgagattaagattatagtggttgatttgtgaggataatatattatagttggggttagaatatttatatagataattatttattttaaagtagaaaattgtttgtaagaaagaagagttatggttaggtttatatgggggatatttttgagtttcgttagattttagtttttagtttattttttttttttatagtgaagggtgcgtttagtttgtagttgtgtttatagattttatttacggtttgtttgtttttttttaagagatttagtcggttgttttattgtttagtatttggttgttttagtttggttaatgttataaatatttttatattattgtcgaaacgtatatatttttttaagttaaagatgaatttgattataaattgtattttttttgtttcgttggtgaagtaatagttagtttttgtttgaattataaaattttttggaaaattaaaattaaaattatgaattagtttttttttttgggaaaatttatgtttggtaaattacgttagattatatggatttaagaggaggtttttgattttagtatgtttaaaaagtatagtgttaagtgagaaaagaaatagaatgggatttaatagagaatgatatttattaaattttaaaaatatataaagagtaataatgttatatatttttaaaagttatttttatatttagagatttattagatacgtttagaatggattttttagggaggggagagaatgagaacggaggtaagagaagagacgagagagttttgtattattgttaataattataatgtgttgtgaatttattgggtaaaattaaattaattttatgtatttaagaataataattataataaaaaggaaatttaaatggagttaataatgtaggtaagttaggaaggacgttttgaagatattgtatttaagttaagatttgaaagataattgttattaatgttgggttgtaatttattttttttttagttttttttaattttgaattgagttataagaatgatttttttaggtgaattttatttattttttatttagtagttaattttagatgaagttttagtttgtaattttttagtatgtatatttttttttattttttttagtagtttaaattaggggggaaatttgaattttttattattatttaatatttgtgttgattttttttttagttgtattgtttaatggatattataaatttagggcggtttttattttttgagaataatgattttttttggttaggtttgttttttttttgtatttaatgaaattaatatgtaaaggggattttgtttttagtatattatattttgtttttgtttattaatatgtgtttttattttatattgttttatggttgtatattttgttatttgtgttagaaaaataatagtgataagtaatttgtatttggtgggcggaggataaggataatgtattttatttaattttttttattttttaaaattgtttagtataattttgataatataatagtggtttaataaatgatagaaggagtaatttttgtttttagttttatttgtttatatatattttaattgagatttgttttcgtgttttgattaaaaaattatagattgtttttgtgatttagtttattgtaggttgttttttttagtaggttcgaatttaagttaaggtttttaatacgtttaggtattgattgaggttgatatatataataaggattttaaataagatataatgtttttttttttttgtttttttattttttgaataggtggttttggtatatgaagtttattttatgtaaagaggtaaggcgtatttttttgttaaagggaagaatattgttttttgaaattaaaagttatttttagtttggtttgtggtttggatttataaagaaaggtattatttttttatgttaatttttgtatatatattggaaaaaaataattgttttgtttttatttggagagtttgtgttttgagttatggaggaatttagtcgggttagatttattagtagagttattatttaggggatttatttagaatttattttggagaaaggaaaaaaatgagatagtaaaatcgttagtttttttagaatgagtttataaaatttagttagaaagtatttattaagagtataaatcgttgtttttttggtttttttaggattggaaattttttagattgataattaattaagatagaagagttttgtattattaggtattgggtaggatatttttataaagttgtgttatataatttaattattgtttgtttgtagaattattgatagtaatttaggtatattaaaaatgggttgggagaagaagtaaaaatatatgtttgatatattatggggttttagaagaattaggtagattgtttattatgtatttttttattttttggtttgttttgattaataggtttttttttttattgggtgttgatattgtcgataggtagtgtgtaaattaagaaggaattaagagtatgtaaattaagtattttgaagtatatgttttaagaagatttagtaaagggattattagagaagaaatagaagatatagagaatatttggagagtacgattttttataagttaaaatgattataaaaaaagaaaagaaaagaaaatatggaaagagaatttttaaagaataaaattttgtaaaaaggtttattaggatataatttaagagagtattattgtgttttatggttagtagggtattaataatttttaagaggatagtagagtgttaaaggtagaagttatattttaaaagaatgaattggaaataagaaaataaaggtcgtagattaaaatagttttttaagaattttgaaagtgaaaataaaggaaaaaatgggatatattttagaaaaaaataatattaagaaaaaatattttttttgggttttttaaattgatacgtaataattgtatatatttatggggtatagtatgatgttttaatatatttatatattgtgtattgattaaattagggtaattagtatgtgatatatatatatgatggaatattatttcgttataaaaaagtatgaaattttgttatttttaataatatgggtgaatttggagggttttatgttaagtgaaataagttaagaatagaaggattatattacgtgattttatttatatgtggaatttaaaaaagttgattttatcgaagtaaagagtacgttaggagttattagaggttggggagttaggggtagaaatgggtagaggttggtaataagtataaagttatagttagatagaaggaatgagttttggtgttttgggaaaagaaatttttaagataggagagattttaataaggttgtaagtgaagtgtaaggtatttgtagaaaggagaaattgaagagaaaaaagagaagaaaggggatattttttttaaaatgttgtggtttgaatgttatttaaaatttaagtgttgtaatttaattattaatgtgatagtattaaaaggtgggttttttaggaggtgattaagttatgaatgtagaggttttttgaatgggattagagattttaaaaagggttagagagagtagggatgatggtttatgtttgtaattttagtattttgggaggttgaggaggaagattgtttgaggttaggagttagagatttgtttggaaaatatagtgagatttttatgtttaaataaaatttaaaaaattaaagaaataaatatggtggtatgtatttgtggttttagttattttggaggttgaggtgggaagattatttgagtttagaagtttaaagttgtagtgaattatgaatgtattattgtattttagtatgggtaatagaacgaggttttgttttaattaattaattagttaattaataaaaatagaagggttggaggtaatagtttggtatttttgtttttttgtttttttttttgtgaggattgttatattggaatgatttgatttaagtgtttagttaagtatttttttagtaaaatttagatagtaaaatattatttttaagtaaataaaattaaaagtgtaaattgtaatttattatttatgttattattatttaaagggtaatgtttatttattattttatattattttttagtatgaaatgtgtttttgatttgtttatattgtgtatgttaagaatgaatttagggtattatggtaattataagtttattttagtgattttttttaagtcgatggttaaggtattaaattttttagggttatgattttgaatttttagtttttagaattgtgagaaataaatttttgttttttataaattattttatttcgtgtattttgttatattaatataaatggattaagatagagagtataaggtttgggggaagaagggtatatttttttagataaaagaataaagataggacgattagtaggggataaaggggaatgaggaagttttatttagatggttgtaagggagttagttgagaataaggtaagatttgttaaaaaggagttggaagaaaatatatttgataattaagaagagtaagaagtggtttgtaagtgagtttttaaagttttaattaagtaggatttagaaaagagaggtgagatgtaattgtgtaattttttattgttttatgatttttagtaaatgtttttggttagaggtttggattagattaattagaaaaataattttttttttatgggagattataataggtaaagaaaaagagagtaagacgtggaagatatcgttagtgtttattttttaatttttaggtttatggaaaacgagaaattagattttttatttttttggagttgtgtgattcgtttttattaatggaaagtgaataaaaggtttttggttaaagaatttaatttttcgtgtatgattttttttttttttttttattaagttaattaagatagttttgtgttgagatggtataattttagtagaaaagtagtttaattagttgagttattatgaagagtagttgttttagggaattatttatatttataatatattttgtatgaatgagaaataattgttttttaaagaaggtattggtttggttattatagtttggtttgatttgatttaattgttataggataggagttaggaggttgatttttttttttttatattttttatgtaaatgtgacgatttatgaagtggaaggttggttataggtttattggtagattttcgagtataaggtatttgattttggttttgagtattttttttttaggtggatggttgtggagtttatattggcgagggtttgtgtggagtcgaggataaggaggtattagagggtatttaagttattgggtttaatttttttttttttttttgtttatatttattttagttttttttagatgttttattgtatttggaaatggagataaatatttaatataggttaagtgaataaggatacggtacggagatgattagatgtagtaatagtatgagcgggtggaagaggcgtgtgtttttttttttgtagatagtattatggttggtttttgtagttttttttagagttgaaggaagggttatgtggagaggagaggaagggtttagataatatggattaaacgggggtttgtatttagatttagaggagagagggggttgataaatggtaagggatgtggggatggggaggaagtggaggatatggcgttggattagaaagttaggagggttgtttttttttttttgtaaatgtgtttaaggtttataaattttaaaatttgatttgtttatataataatagttaatgtttgttaattgtttattatgagtttattttttaagtattatataaatgtgtgcgtgtgtgtgtatgagagagagagaaagagagagaattattatataaaattttttgtagtagatattattatgattttttttttatagatgaggtaaggatggaatgaattaaagtttatataattagtaagtttttaggttatattttttttgttatattgtattttttgggaagttagggaaattttatttttatagttttagtatttcggtaatgataaggtatataaaaagggaaaataattaaggaattttattatagttgtttggtgttaggatagatttttgtaaggaaattatattttatttaattaaaggaaattagtgattttatatgataagtaaggaatggtatagagtttggtatgggaattaagaagagaaagtaataagttttagttagtaagttatggatttttttagatggtttttggtatattttaaataaattgaagtattagatttatttttattagaagcgtttttgagttattttttgtgtatagtgttagtgtttacgatagaagggtttgggtttattagagatattgtttagttttggggagataagaggaaaaagatgtggtttttttttttttttttgtatttatgtttttgttttttatttgaacgagtttgaaaaatagggtagggtgttttgattttttttttttgtttgattttagttagtagttttttttaaatagttataggtttttttgtgattttttatttaagtttatattttgtttttttttttttttttttttttttttttttgaggagtgagagaatttgggtgtatgtgtggttgttttttgagggtggtataaaattattattttttttattgtttgatataaatatttttttaattgttattttggtgattttgatatggaagtaaaacgtatattttaatttatttttttttttttatttttttttaatatattaatataatttatattgttttggaggagttatgaaaaatattttgagtttttaggtagaatattaaattatatttttagagaatatattgttgagttatagtttaattgaaggaattgtattaggttaagaattttgttagtttaaaatattggtttaatttttttttagtggtgattgacgttttaaattagtaagaggtgtaatatgaggggaaggggttggggaagagggaaaggatgtaagaaataaaagaaatagttagaatttggggtgtttaaagtaaatttatgattttatttagtgagaatttatttggaaattgaggaattaaaggttttgggttttaatttgtagttatttttttgatacgattttgggataggtggatttattcgaagtattgttttatatgtattatttgttttaatttttttgtgatggttttgtttattattttattttgaaaaaataaatgttggtgatgttttgttttatatattcgtttatttgaatttattatttttaggaaatatttattgaaatttaaaatattatgaatttttaaagggttttttagaaaaaaaaaataaaaaaaattttttgattttaatgggtgttttttaatttgtgttagaatttgtttgtaatgttttatttaggatttttgtgttagtataataagtaaatttatttataatttttatatttgtgtattgttatagtttaatattaatattatatttgttttataaaaaaatttttttttatgttattgagttatttaatttttgtttgtttgtttgtttgttttagagataaggttttattttgttgtttaggttggagtgtagtggtataattatagtttattgtagttttgaattgggtttaagcgatttttttattttagttaagtagttgaaattataggtacgagttattatatttggttaatttttgtattttttgtagagacgggttttcgttgttgtttatattggttttgagtttttgagtttaagtaattcgattgtttaggttttttaaagtgttgggattataggtgtgagttattgtattcggtttttatttttaattttaaaagtttgatatagatgtagtatatttatttttttattgatagtaatattttttattttttgtgtttatatttttttttttttttttttttgaggtagagttttattgtgtcgtttaggttggagtgtagtggtgcgattttggttcgttataatttttgttttttagatttaagtaatttttttgtttcggttttttaagtagttgggattataggcgtttattattatatttagttaatttttgtatttttggtagagatagggttttattatgttggttaggttgttttcgaaattttgattttaggtgatttattcgttttggtttattaaagtgttgagattataggtatgaattattaggtttagtttatttttttgtttatttaattggtttagtttagggaaagggaattaaagtgttttattggtagtatatttttgaatattttttttgtatttattttaatttttgttttataagagttatttatttggtatttagaatttaaatatatgttttatatatttatatgaattttatattttatattataagtgtttttgttatatttaattttttttttttttttttttttttggtgaggagtgtttgaattttattttgtttggtaagacgaatgtgatttttgttttttttttgtttgtttttttttgttatgtttttgtttattattttatttgttgaaaataatgaatatatttttttgagtggttttatgttaggtgttttttgtatattgtaaataatagagtttttattttaatttaatttaaaaatatttttatttatttagtttagttaagaagtttatttataattatttatatagtaaatagatttagtttaatttagagatattaatttttgttaagtataatgtttatatgagtatttttaaaaattttttattatgtttttattgtgtattttaaaaattttatttttttagatattaaggaaggtgtatattttaaggttgttttgataagtttatttgtatataatatatttagttttttttttttttagataatttttattagttttaaataatgaataattataaaattagtttatattttttttttttttttttttgtgtgtgtgtttatttttgtagttttaaatgtgtaaatacgagtatttgatttattagttttaaagaatatattttgatttttagatgttatagataagaatattaataggtttatttgatatttttatttatttttttatttattttataattattgagaaatgtgttttaattttttaattaatttttttttataatttttttatattttttatatattttgtagttttattgttaggtgtaaattgatttagttttagtataatgttttggtgattttattattattatgtaatggttgtttttgtttttattaatgtttttggttttagattatatgtttagatatttttgtaattatataagttgtttttttgttttttgttagtgtttgttttgtgtattttatatttggttttgatttaatatttttatgtttttaggttttttgtgattttatgaagggtatataattggattttgcgatattgttaatttaatttgagaatttttttttaatttttatatttaagttatttatatttgtgattattgtgttatttatattcgtttttgttataatatatggtgttttgtatttgttatgttttattttgttttttttgttttttttgtattatttatattaaattaattatatttttatttaaagtattatttaatttttttttattgatttaggaattttaaattttaattatattagttaaaagttagttttatatttttaatatgtttattaaatgtggtagtatttgaaggtaattaatatttttattttttttttaaataagataaagattttaggtgttttaattttgtttgttttatttttatgttatttgtggttgttttgttttatttttaaatttaatagttatttttattattgatttttatcgttatagttatattttattttttattttgattttttaatattttagatagatttgttattgttgtttgtgtgtgtgtttattttttttatttttgtttttttatttttttgggtttagtatttttgttatttatatgataatattaaaaagtaaatgataattataatataatgttatttttatttagaagattgttaaaattttaaaaattaatattgtttgttggttatatatatatatatatatatggagaaatagataaatttatatgttgttgttggaattataaattaatatagtttttatgaaggtaattttgtaatatttattaatatttgtaatgtatatattggatttagtaatttttttttaagattgtattatatttgtatttttgtatatgtgtattataatgtttatataagattaattagtaatagtaaaagatttttaataatttaattagttattagtagaaggaaataggataaatgaaatatggaatttttataaaatagaatattatatagttatatatttttaatttaaaaaataaagtttagaatagtgaatttagatagttgttgtttgcgaaaatattgagtaagaataaagatatatatatttgtttaatatatagtaaatttttttggaaagataaatataaagttggaagaacggattgtttatgtaagaggaattagtaaattttgagaaggattgagagtgaggtttttttttgtatatttttttgtgttttttgaattttaaattatatttatatattgtttatttaaataaataaataatatattttaaaaagaggatagtaggaagataagtggagttagggagtataggtaatttttttgaggagttttatgtaaagttgggtaagtttattttttttttagttatgtgatttaggtaagttagtaaatgtttttaaaattttatttttttatttttagaattgagatagtaatatttgttatatagaattattttgaaaaataaggtaagaagataggttttagatatttggtatagtaatagtatatagtaagtattagtgaatgtttagtagtagtaggagtttaatttttaagagtttatggaattttaggtttaaaatttagttttttttgggattattagatggtattagatttaagtaggtgtttttttagttgatagttttaaaatataaggaagatttttgttttttttattttttagttttttttttataaaattttgataattacgtattttttgtttgttttataattgttatgtggattttaagtggttatttttgggtggaggtataaaggatttgaaatttaatgttgtttttatatagggtcgggtagataggttatggaggtgttttggtatttaaggaaatttattagttttttaagtttttttttttttatttatatttttttttagaaagaataaggtatgtttgggtgggaaagatattgtaggtaagcgataagaaggggaaattatagggtaaggagattaattaaatggtgatggggggtaggagtgaataaaaagaattttggagtaaattaggattagtgatatttgtggtttttagataaattatatttataggaatttgtttgtttagttcgaatattttgatttttagggagtatttttttgtgtttttgatataaagtttatttgggagttttttttgagataagaaatttttaggatattttaaggtttattgtatttttttgtattgtttattaagataagttttttatttagttttattatgattagttgcgtgattttatgttagtttttttgtaaaattaggtttgattgttgtattatttttaagatgttttttaggtttaaagtattatgatgtatgggtataattgtattgaggaaattaaagaattttttagattatttttttttgtgagggttgtagtttttatgtagttgggagatataggaattattatttttgttttatgaataaaggatatttgtgggagagaaaggaattaggttagagttttttttttttaaatgtttattttattttttgtgaaatttgagagatggatgggtgtggagttgtaagttagttttaggatgaaagaaaggtaaatttgtataagaaattgtttatttttattttatttttattgtattttgtttttaatagttgttaggtaagaaaaaatttaaaatagtagttttggggaatttattgttagtattggaaattatttgttgtttttaggaatatgaaggttttttttttttagaatagtaattttttaaggtaagttttttttaataattagtgatgtgtataatgttgtatttttagtggtgggagtgggtagggaggattaagattagtacgatggtggagatatttatttatttatttaattgattatttattttttattatgaattagttttcggttaggtagtagatataaagtttaataagatatatggtttttcgtttaggtgtttatggtttagtggaaggttaaaaaaggtgggaaagggaagatagaattttaaaagggttgtgaaagaggtaatcgtatagtgatagaagtatatggagagttttttagattgacgatataagtaaggttttttggaagatttgaattttgagttaagttttgaatttgaaaattaggggcgagtcgagtagaaaatgggtaagaaaatattatatgtaaaggtataaaggtgttggggaaggtagaaagtttgtcgtggagttggatataataggagagggtgagatagatgggttggaatagtgtgtgttttgaaaaggatttttgtagtagggtttgagagtatttgaaggaatttttagaaatgttattatcgtatgtgatatagaatttagaaaaatgattttgtgaagaatggtcggaagagggaagttaatggtagagaaatttttttggtgatgggattattttaagtttatgagtgaagattataataacgggattggagagaagagaatagattttgaattatttagagttaagagtagtagagttttttttgatgggattatggattagggtttatggatttaagatgtaatataattgattgggttagggtgtggattttagggttaggtttgtgtttaaattttaattttattattacgattattttgggaaagttattgagtttttttgagttttagtttttttatttgtaaaatggggataataattaattttatagggttggggataatgattaaaaacgataatatatgaaaaatatttagtatagtttttatttttattaaaattttataaatggtagttgttattaatgtcgttattaatattgttaattagggaattgttttttgtttttttagattttagtttttttaaaatagtagatattggtaggaataaggaaggatataggaaggtaattttatgaatatttatgttatttttggttaatttttattttaaataatagataaacgattgatgggataggtagtaaaatagtaattatggttatttttaggaagtgaaataatgggtatttttattttttttttttgtatttttttatattgtttaaattttttatatgaatgtatatagtttatgtaagaaggaaaatattttaaaatatatgtattatgttataaaatattttttattattaggtaaagttttagttattagggaattaagttttttggatatagatagtttttattttattttattttatttttttattttattaaaagtatatagtgtttaaatttttatcgtgtttgtaatttaggaatagttatttggtcgtatagttttagggaaatttaaagtaggaatagttttgggttttggagacgtttttgagaagagggtttagtatttttggggttttagtttattagtcgttgttgtattaggcgggaatagaggttttgttttttttagagttgggtaagtttttgtagtttgtttttttggagtattaggatttggtgggcgcgttgaattgtttgtagtttgtgagtaattattagtattgtgcgatttttacgggaattttagttttgtagttgaaggggtgattatagtgttttagaaagataggaatgagatggatattatatttatttgggtattattttttatgatttagggtaaagaaggtgtgaaataaaagaaggtaggaaagggtagtagataaaggtttggattgtttttttttttcggttgtattgttatagttggaggaatggaagtttaggagggaattggggttgtttttatattatcggattttattttttaattttaagaaggtatagattgtttttattagtaggtttttcgttttttttttgtttaattttgtatagtttgatttttttagtatgttttttttaggttttattgttttttgtttttttacggtatttacggtttgttcgtattgtatatttagggtattagtagttttatttaggatgaggattcgcgggtttcgtataagggttcgggtaatggttagacgttgtttttgtttcgtagttagttggtttttttttttttttatatttgaggaaattagagaaatttttttttttagatataagtgatatagataatatataaggagggataagtgtatagtaggtatttttagtaggatttcgggaggtgggagggtttagtgcggggagggtttagtgggaggagggttatggggtggggatttgacggggttgtttatggagggagtattattgttgtattgttttttgtaaataaagatttttgattaagagggaggttgaagaatttagtgtgtggggaaggagacgtaggaatggaggaaagggtagaggaatagtaaatattaagttatagggatacgatttttattattaagagtaagtttgatttttttttttttattgaaggagtaagtttataatttgtagaagatatttgtgtatattttatgttttattttttggatgaagttatttgcgtgggtagtttgggtagtcgttattattttattattttcgtagttttgtagtttataagtaatgttgttttttatagaatcggagaatagtataggtttttgtttaattgaaattatttgtgtagtagggataggggtagaggattatgtgtaaatttttaaggtaggggtttttttgttttttttatttattttttttagaatgaatatttggtgcgttttttcgtggattttttattttttttttgtatatgttttttttttttgttttttgttttttttttttttatttatttggttgtgtaggtagtagtgtttatattgtgagatgggttttttatttagtagtatttgtttttttgtgggttggtatagattttgtagtagggtagttattgtgttttttttagatttattgggttttattagcgtcgttattttattaggacgtagggtaaacgttagtttttagaaaattagaaaaagagttaagggtttgtttttttttttttaaaatttttttatttttttttttagtagaggtaagattaggtttttagaggtaaatgaattataggttgtgatgtttaattatgtattagtagtagagagtaagggtttaggtttttttttttttttaggtattttgagtataggtttgttagggcgattgggatatgtaaaggagacgttttggaattttataattttttgtagagtggtgggggtaagcgtgttaggtgaaggtagatttggttgtcggtttatgtaggagaaaattttttttgtagtttttacgttgttgagtatatttttatatatgtatattagggtttggaaaataggaatgggagagtcggttaattaaatatatttttattagaaattatttttttaattttttatatattttatttataattgtattgttttttttttatatttaaaagagattttttatttttaaatgtataatttggacggaatttaaaagtggtattaatattttagtgttttaatttgtaatataaaggatatatagtttttttttttattatatagtattgtttttagttttagatttttttagttattgttttttattatttgtgtttagttttgttttgtttgattagacggggagttttttaaatgtaggtattgtgtttaatttatttttgtagtcgttagagtgtttagcgtagttttttatataaaaaagatgtttattaagtgtttaggaaaatgtttaaataaagttttggatgaagtagttgtttttgagaattggtaaatgtaggaagagatttaaatgtttattttgtttttttttattaaattgtattatcgggtaatgaaatggtagatgaggggaagtttttttttatagattattttagttaatatatgaagaatgatagagtattttttttttgtagttttaattttgttatggatgtaggtattgtttattagtggttgatgttgttataaatagagaattagatattgtgtgttttttggaggaagaatgtattattatttaaaaagtattgttgttggaaaaagattaaaaaaaattttttaattttataagtttttaggtttatttattaatagataggaagtatagaggtagaagagtatataatattatagggatttagttaataaaatttagattttaagaaattttataggataaataatttatttttttaataaataaattgtgtaagggaaatttttagatagatatatggattgatgggtggatggatggatagatggatggatagatagatagatagatagatttaaaagatgtattaattagttataatatgtggattatttttggattttgatttaagtaaagtataataaatatatttatatatatatattatatggatattataagtggaaatttgataattgattatttgataaattttaagaattattgttaattttttggtgtgataatggttttgttgttatatatttttaaagatgtttgtatttttaagaaatatattgaaatatttatagatgaaagtatataatattttggatttgttttagaataatatgggtggggggaagtggttggggatatagatttaataagattgggtatgagttgattattgttaaagtataggatgtatatatgtgagtttgtaatattattttgttttatttttggtatatgtttaaaattttttatagtaaaattatttgcgggttttggttttgtattgtattgttaaaaagaataaataaagtttaaggtttaggagtttataaagaaaaagagagggaaaaaaggagagtaggtttggtttttcgtttatttgtatatagttttttacgtttttttggtagattataaaggaaagtaggttgttttgggtgagttttttattttgtatttgttgtagtttatagtttagtattagtatttgtatttttaagtgtagtatttggaagaggagaagaaagagatgaggttgggaatttttttattttttttttttttttgtttttatgagattgagttgtaaaggtttttagaattagttgtagttttttttttttttgtttttttttttttttgggttttttttataattattttggtattttattttttttacgagtaggtataaggcgcgttttaggttttttcgttaatatagttgtcgatattgtttaagggtttttttatagcgatagattttatgtttttcggttttaaaattgcgaacggtttgtagttttttaacggtttttcgtattatttgtttcgttttggttattgtattttggatttttcgaagtattttttggaaaagagggttagtaaatattagggttgatgtgtaaagatagtaggtttttatattttattttagttagtgagatgttttttagtttatttaaaaatattaaattgttttttttttttttttttatttttttttttagaaggaataagagtgaaggagtaagggaataaaatattattgagtttttagtgttaggtagtataggagatatatgtaatttttttaatttttatttgaggtaatttttttatttttagtgtttgaattaggaaagaagggtagtttttttaaggagttatagatagttaagaaaggtggagatgtaattttaaatggattagaggtttaaatataagagttaatattataaaatttttaggaaaatgtagaagaaaagttttatgttattagatttggtagtgattttttggatataatattaaacgtataggtaataaaaaatagataaattagattttattagaatttaaaacgtttgtgtattaaagaattttagtaatagagtgaaaaagtaattatgaaatataagaaaatatttgtgaattatatatttgataggaaattaataggtaaaatatatagtgaatttttataatttaaaaaaaaattagaaaatgggtaaagaatttgtagatatttttttaagaaagaaatataagtggttaaaattatacgaaaagatgtttaatatttattaattattagggaaatgtaaattaaaattataatgagataattttaattatttaattattattagaatggttattaaaaaaaaagataatagaaagtggtgttgatgaggatgtggagaaattggaaattttatgtattgttggtgggaatttaaaatggtgttgtcgttatggaaaattgtatggtggtttgatacgatttggttgtgtttttatttatatttgattttgaatttttatgtgttgtgggagggattgggtaggaggtaattgaattatgagggtaagttttttttatgttgtttttgtgatattgaataagttttacgagatataatggttttaaaaaggggaatttttttgtataagttgtttttttttttgtttgttgttatgtgaaatgtgttttttatttttcgttatgatttgaggtttttttagttatatggaattgtaagtttaataaattttttttttttgtaaattgtttaattttgggtatgtttttattagtagcgtaaaaatggattaatatatggttttttaaaaattgttaaatagaattgttatatgatttagtagttttatttttaagtatatatttaaaagaattaaaagtagggttttaaataggtgtatatttatgtttatagtagtataatttataatagttaaaaggtggaaataacgtaaatgtttattgatagatgaatggataattaaaatgtgatatatgtatataatagaatattatttagttttaaaagggaggaaattttaatatatgttataatatggatgaggtttgaagatattacgttaagtaaaatatgttagttataaaaagataaatattgtatggttttatttacgtatcgtatcgggagttattataatttatggagatagaaggtataatggaggttgttagcggttaggggttgggggtagtaggtagttattatttagtgggtatagagttttattttaggaagatgaaaaaagttttggagatggatggtgatgatggttatttaataataatgtgggttttttaaatgttattgaattgtatattttaaatggttgaaatggtaaattttatgttatgtatgttttattataatataagagaaaaagagaaggtggagttgatatttagatttaggattttttgatgacgttttttttttttatgttgtatttagattttttttgttgattttaaagggaaaatttttttgtttaaaagtttttaagaaattatttttaattttcgtagtgggggcgggggatgtatagatttttttgagaagttaatgaaaagttattatcgtttattattttttttttttatttttttttttatatttttatatatattttatatttttgtttatagttttggagaattatgaattttttgaagttaaatatttattgttggatggttggataaataaaatgtagtatatattataatatatttttttttttaatggttgagaagagaatatttttttttaggggattttttagttataaatgtggaagtttttttatttgttagttttattttttttttggggtttttttatatgtacgtttatttgatggcgggtgttgtatatttttttcgttgttattgtgaagggtatgtgtagtagagaaaggagggtgagtcgaggcgatatgttgagtatgaagttatatagttttattatttttattaggtttcgtaagagtatattggtatttaaaggaagttagttatttattagggtggtattcgagtttagtcgtgagtttagtttttttaagaaggatagagtaggtgaggaaaaaggaaattatgtgtattgtagggtttttagaaatttttttttgatcgttttttttgatatagtttttttttttgaatatttttttttatttgtagagggatagtggaggttgtttttttattttgttttaaataagagaaaagtatttttaggttttggtatacgggtgaaggtaggaggagaggttgtgggtggaaggttattgaggggtaagggatgtttatgggaattttagatttggattttaggttttatttgttttagttttttggaagaaatcgaggttttggcgtagtagggaggagaaaagttgttttcggattcgtaagttgattcgagatatggtgtaggtgaagtagttttttcggtagtttgtagatagtgagttgtggggtaggagaataagaggggagggagatgtagagaaggagtaagttagcgggtgaaatagaggagtaagttaggagtgtagagaagcgtaaagttaggggaaagtatgttaggaggggtaaaagagaaagaaatgagagatagatatatagagagagaagaggtaaggaatatatagaggaagaagaaagaggagatatggtgagttagatgtgagaataaaattataatatgtataaatttataagtatttatggagtgtattttgtattagatataatagaaaattataatagaagggaaaagatattgtgaaaataagtattttagtgtttgtttttgttttagcgttttttaggtttgtttttttgtgcgtttttttcgttttggttttttttttgttttatatttaaagtttttttttgttattatagatattttattatgggaattgtaataataaattttttgtttttataattttttggagttttagagttatgtgatttttatttgttatttttcgagttggaaaattttttttagattaattatatgttatagtaatatttagaggaaaaaatataaagtataaaagtatgtattttataaaatatatgtttttaatataaatttagttattatattgaagaggcgtttggaatagttagatatgatataatgagggtttgtattttaatgatagggatgtgttttgagaaatgtgtcgttagatggttttatcgttgtatgaatattatagagtgtatttatataaatttagatgttatagtttattgtatatttaggttatgtagtttagtttattgtttttaggttataaatttgtataatatatgattgtatttaatattgtgggcgattgtaatatagaagtaagtatttgtgtatttaaatatagaaaaggtatagtaaaaatatggtattataattttgtgggtttattattttatatgtggtttattattgatttaaatatcgttatgtagtgtacgattgtagttttagtagaaagtagttaggatggaatgaaggtataatgaaatggttttcgagggtattttaaattaagtatgattataaaaatagagataattaggtcggttgggatttgggtaaggtgagtgtatatttttttaaattttgtattttaggtgtttcgtttattttattttagttttagttttattaaatagtttgtttgtttgagtatgtttagaaagagaaaggaaagtaagtgaagggaaaagagtaatgattttggaaagaaaggtgataagttttagagtaagatttttagggattagtaagatgagttgggaaagaagagtgagagggagaagtatatttattttgagagagtgattttggagagatattttggagatagatttaggggtaggaggtaggaggtagaaagaaatggaattttatggatttaggaatgttgagagataattgagagatattttatttgagatttaaattttttttgtattatttttatttataatttgtttttataataagattagataaattttgaagatattggatgaatatgaacgaaggaagaaatgaatggatagatgaaatagaatggtgattatatttattatattttagtttaagtatttttgtgttttgcgtttgaaagggtttagaaatggagttagggaagtgaagatttttataaagatttggggttagtaaatggatttagttgtttattatttatttgttaaaggagaagaggtatatgaagaagatggtattggtaaaggtatgggggttaaaattattttttaggatgttaattatacgattagaatagtgagggattaatgttttatttgaaagaggtatgaaaaataatataagaatgtgttggtgtttaggtttttttattatttttaatttataacgtttttttttgatttatttaaaatagtaaggataaggaagaagaaggcggtaacgaggagaggtaggttcggtttggagagttttagtagtttttatattaagattttgttgtttatttggttttgtttttttttttgggttttaggagggtttagaatagtttatagtgattagttgagtttcgtagtttcgtattttattagtagttagttttaaggggttgaagcgattttggttgggggagtacgtgaggttttcgcgattagggtttttagggagatagttaggggggtggttagatagagcgggagtagtagtgtttttataaattttagtagtttttttagttttagtagtttttatagtttttttagtcgtagggttttttttagttatagttttggtagtttttgaggaagtaaagtttttagagggttttgaagtagttatagtaaagtcgcgtttattagtagtagggaggtttagggttttaggttagggagtcgtatggttttgttaacggatacgagatgagaaattatgggggtggagttttaatttttgtttttgtttttttattcgttcggtttcgtttaattcgtttatcggttttttattttattttatttaattttgagagtttttttgagtaatcggtgtttattcgtatattttttttacgatagatagttttcggttttttggggagttggaagtatgattattaggagtttcgtgtttaaaaaaaaaaaaaaaaaaaattttcggatttttatttttattttcgtttgtcgcggcgagttaagtggttcgggtttcgtttttttttatcgtcgggtgtagagggattgggaagtaggagcgtggagtgggtagttatttgggttgcgtttttgttggcgttttaggttttttttcgtattaatttattagtcgcggcggggagatcgtagtttcggggatttttgttttagcgttgaggttcgtttcgttttttttaatttcgttatcggttttggttcgttagttacgttcggttagggcgggcgttagggttcgggtagttttcgttttcgtttttttagttaaggtttttattttgggttgggtcgtcgggagggggcgcgcgagattcgtagatagcggaattggagttcgaattttggttcgtattgtataggtttgtaatgagttttattcgtttttagtggcggttattttgggatataaaattgtaaaaatgtttttttattattaagtaaaatatagttgttttaagggtaattttatttgttgtttttgttttgtaattggagaatgttttgtaattggagaattattgaatttttttaaagttattattttaagttttgagtttattattaagaagtgttttttttttggttcggcgcggtggtttacgtttgtaattatagtattttgggaggtcgaggcgggcggatcgtttgaggttaggggttcgagattagtttggttaatatggtgaaattttgtttttattaaaaatataaaaattagttagggcgtggtggcggacgtttgtaattttagttattcgggaggttgaggtaggggaatcgtttgaatttaggaggtagaggttttagtgagtcgagatcgggttattgtattttagtttgggcgataagagtgagatttcgtttaaaaaaaaaaaagtgtttttttttatgtaagttttagttttaggcgagcgagtcgggtttttttaaatagaaggttttaattaattttattaggttaaaggggatttttacgtatagattttgaatttagtaggttttgagcgtttatttttattcgttttttttagtcggagtattttgagttggcgcgtgtttaggtgtttttgagtttgtattttaaattatgttgggcgtatttttagtttatgagggaaatgtttcgtattgagttttggtttttgttttattttaatattgtttagaatagtaattaggtttttaaatattttttttgatttagagtttttttatgtaatagaaagattcgtttattttagaaaggattttttagattgaaattattttttaaattaaaaataaataaataaataaattttttaaaggaagggtcgtttggattttagattattattttgaaatgttatttgtgtgattattaaggagttatttaaagtttaaaatagtggtggtggggaggagggattttaagtaggggttcgttaaagttttataattttatttattttggtattttaagaatttttttttaatgaaaaaagttttatgtttaagtttatgtttttatttttaagtatttgttttttttattttttggaaagtgatatggtttatagttttagtatgatttcgaaaattttatgatgtgtgttttttttttttaatttggattttttatattttttttatattttttatttaggggagtttttttgattttttttttttttaaaattatagttttgttattttgtaatttagtatgatatattatgaaattagatttttaatgtttgtttttatatttaatatttaatatttttaaagtgttatttgggataaatggtatggtgtttatatgattattatattaaagtgaagtggaagtttttttattttattttataaagttaaaaatagttattttaggtgttttattttttgttttttaaattattaataatggaatatataggagtttttaggtgtttttttatggaaaggattttaatttatgtgaaattgtaaataagtgtttatggatagtaatgagtagtttttttgaggttttggagagatgagtgtggaaggaaattttaggaagaattatgtggtgaggttatattttttagataggggtttgagttttttttttagaaaaagcgtttttttattttttgttttatttaataattataggtttaattttatttagttataagatagaggtatttataatcgtttttttttattttatttagtggggtatttagaaatttttttgggggaaatgtttgtttaaatagagaatacgtagaagatgtattttatcggttttttttggttgttgagttcgtattttttttttggtttaggttaggtttttttttttttttggatttaacgtggtttaggtttttgagtcggttaagattttttagaggagatttgtttagttgttattattattattattgattggtttttcggtattggtgtagtaggttattgatatttgtattttttatttttatttaattatttttttttatgtggtatattgtggataaatgagaaaagaatatggagttattttttattttagtaagtttttgttattgatgttatgttgaaggtagtaataagatatatgcgtaagtttaaaattatatgattgggtttttaatgttttttttttgattttgaaaattttttttttattatttttttttttttgagttttttaattattttttttttttttttttgagaaggagttttattttgtggtttagattggaatgtagtggcgttattttggtttattgtaagttttattttttaggtttaagtgatttttttgttttagttttttaagtagttgggattataggtattcgttattacgttcggttaatttttgtagttttagtagagacggggtttcgttatgttggttaggttggttttttaattttaaattattttttttattattcgtcgattttttttaggtatggtggtgggagtattggttttttattattgataacgtttttagaatagttgtttttgtgagtggtataagtaatagttttgcggttaaggttataggtttttttagggttaagattaggtcgatagttattgtttatgatttcgtaggtataagtgtttttattattcgtggagaatatattttttgagagtcgagttttatgtttatttacgtagtagagtttaggattttataagatgaaagattttaggttgaaattggagaggaagatgttggtaatatgggggtttaaatatgagatataaaaagtgaataaaagaattaatattattataagaatattggaattaggaaattattttggtaaagttatcgaattttagaaatgaaaaaggaaaaataaatttgaaattaattgtttaataaaagggataagtttataaaatatatgtaatgatttatatttgggttaataaatagtttatggatatattgaaatagttttataattaagtattttatatgttatgtattttgttagggagggagtaggagtatatgatgggaaatagatttgttatttatagggaatatggtgggggaatatgaagaatggagagtatttatttttttattttagttatagattatattgtttatagagaggtttatgtttcggtattggtatattatgttggatagtagtttggaggttgtcgatattgaaatacgttttttatttcgtagatagtatagtttgggtgaggataaggtggagtgaggaaagagaggttagttttttttaatttgatggggtaggaaatgattaaagagataagtattggaaaggaattattttgtaggatttaaagattagagaaagatttggaatttaaagtatttgaaatatataaaggtagtttagtaaatgatattgtttcgttagggtggatgtgttagtgttaaatatttgacgtattatttggtttatgagtggagtataggttgagatttgggagaagggttttattattaaaaagttgttttgtgaaatatattattagtattaagatggattatataggataagagtaaggagtaatgatttgagagatttagggattaattattaggttaagaaaggaagatgagaggtttcgtttatttgtattttttggttagtaggcgtttttagtattgatagtttgttgtatagttagatatggtgttaagtaggtaagggttaattttaattattttgtttattcgtaaggtatttggaagaagatggagttttgggagagaagggatgattttatagattttttagtgtgttttaaattaatatttatttttattttgttgtagagttggttttttgtggaaaggagagtttagttttttagattttgtttgttggagcgtatatatttattaatgtaggatttagttgaggttcgagaatttattgttgtaattattttatgttggaatttgaaggcgagcgtggtggtgttatgggttattttaatttgaacgttttttttttcgtttttatttagggattggaagaattttgtgggttgataagagaaaagaggttgagaaaggtaatgaaaaattttgtagtaagaggttttaggaaaaggttttagggagtatgagggtgaggagatatgtagaaatgatttaattattaataaatgaaatagttaataattaatttttagaaggaaatggtttgggagaaggaaaagaagaggtatgttagtattaattttttttattttttagtataatagaaatgaaagtaagtatatgttattattattaaaaaattttgagagtgatttaaagggttttttttatgtataaagtatttaatttttataaaatacgtttagtaatagtatttttattttatagaagaggggtttgggatttagattaagtgatttgttttaagtcgcgtaatagtgagttgttgagaggaggttagtaggtaaattttataggttttttaagatattatatattttttatattatgtgataattttatgaaaaaggttttattatttgtgtgtggataagggtaggaaagtttttttgtttttttttgggagtttttattttatttgtaattttttgttttaatttgtattttttttttttaggttttatttttatgtggttttttttttgggtttggcgtttttcgggattgaaggttattttcgattttgtatttcgcgttttcgttttcgttttttttttttaggcgattttttattttttagcgttcgtttttttgtatttttaggggtttttttattgtttcgatttgtatttttcggggtaaagcgagttttggagatcgtatagagaaattgtagtgttttgggttcgagcgacgttcgtttttcgtaatcgggagagtcgatttcggtcgttgttttcggggggtttcgtatatatttagtagcgttatgatcgtttagtatttagagatttgttcgttttcggaggaggaagtgaaagcgaaagttatagatcgaaggggagggaataagatttttttttatatttttttgtttttttcgagaaaaggatagttagtgtttggattaggattattatattggggatcggtttttttgttttttcgttatgggggtcgggggaatgatgggttaagggtttttcgaagaaagcgagaaaggaataggcgtttttaaaagtttatttggcgatgggttatagtaagaggtatttttaggttcgggtattcgttggaaataggggtgggtagggtcgtgttatttaaaggcgtagttttaattagaagattagaagttagttaggagttgggagtagtgttacgcggggtgggggtttttatgagtattattttataaaattaggagggacggaagtgcgagggggtagagttttggaaataggttttgggttaattgtaatagaatatattcgtcgcgtgtaggggaaggcggcgttagggagagggcgtagtttttgaatttttttacggggtttattttagggtttttttaggtttaacggttttttaatttgtagttatttataagagcgtgttttttttgttcgttttttttagcgttgttttttgtttggttgagtattgcggagttttacgtttttaaatttcgtttttttttgtaatttgtgttggttttatttatttagtaattgtcgacgttatacgatttgggtttttttgaatgggagatatttattaggtaatttcgtttattgttttgaggttttttttttaggtgtagttttagagttaggcgagttaggaaggattagcgggcgaggtggtgagttgtgaggcgcgtttagtttttttgttttcgtttggtatttgttttggtcgcgttcgttttatttgttatttcggagaggttacggttttgagttgcggtcgttagtgttttgatgggttttgtggttggggttttgtatatttttgggggtgggtttaaggggataggggaagtggaaggggttttataggaattaaaaagtttaagggaaaaggtgatgtagttagggggtaaaatattgaggatgataaaagaggagatattcgtagttgaaaagtgcgttgtaaaaggtagtgggtcgtttggtgtgtcggaaatataagaaattatagtataaaatattaattttattataaatattaagaatttatagggtgtttatgggttagtatatgtttttagttatgttgaaaatagttgattattttttcgtatattttgaatattttttagttttagagtgttggttatattaaagtattagttttggttttaaatttcgttatagtaaggaattataaattttgtgtttgtattttaggaagtttgtattattacgaggagtttggaaaggaggtaatatatttaaggtaaattttaagtaatttattttggaggtagttgtttattttgtagttgtggttttttattatagagagaagaaaagggagggagatggagtgcgtaggtttgagaaggtttttattttggagtatttgtaggagtttgtattatggtttagtagtatttttttttttttatgagttgttggtgggtttttttttttcggatagcgtttttttttagaaagaggatgtggttagtttgttttattaggttgaggtgttgggtgatgagaagtattgagcgggagtatcgtttagggttttcgtataggagttgttttatttgaggaaagatatcggatcgttagagtcggggattatttttagtttagggagatatttgtgtttttagggttgggattgattttataggattattgttggttttgttaataattttaaggatattaacgttttttattttgagtattttttcgtaaattttttgttttattaaggattgttttatatgaagggtgtaaaagtaggataaaaatgagaattttagggtgaaatacgtgatagaagaataaagattattgaatagtttttttttttatttatggatttggtatttttatattcgattttaaggaaatataatttagtagtaaagagatgagtatttaagttaggtagatttgaatttgggttaaggttgcgttatttaaaagttatatgatttttatatgagtagtttatttaattttttttaatttttattttgttatttgtagaatgatgataaatgtttagtttagaaggatttttaatgaataaatgagtgatagtgtatgtaaatagattagtttaattaatattaatatgattaggatgggttgggttcggtggtttatgtttataattttagtattttgggaggttaaggagggaggattatttgggtttaggagtttaaggttagtttgggtaatatagcgggacgttgtttgtataaaaaataatttttttaaataaacgatattatgaggatggttttttttttatgtttcgttttagaaatttagtttataggattgggcgtagtggtttatatttataattttagttttttgggaggttgaggggggtagattatttgagtttaggaatttaaggttagtttgggtaatatggtgaaatttatttttattaaaaatataaaagttaattaggtatagtggtgtatatttgtagttttagttattcgggaggttgaggggagaatcgtttgagtttagtaggttgaagttgtagtgagttaagattgtgttattgcgttttagtttgggtaattgagtgagatattgttttaaaaaaaaaaaaggaaagaaagaaagaaatttagtttgtagtttgtagatagttttttttaattgattttaggtgtttttgtttcgttttttatttttattttttggggaggtatttaatggaattggatttgggaattgagaattgtaaggattggtttgtataattatgatgttagtaaaattaatagaagatgtataaaagaagtaagattgggtgggatatagttattaagaagatgattgttttatttgtaattggttgtttgtatttagggtattggtggtattatttaggataagtatatacggttttcggattaatgttcgggttaacgttattgtttgtcgttgattttttgatagttggtttttagtttcgtttatttttgtagagtaaagggttaagatgagaacggtatagttatatgtgtgtacgtatgtatatgtatatagatatatttatgtatttacgtatttatatatattaagatttgacggttgtagttggataggggagattttgggaagatgaatagaattttgaggatgttaggatgaagaagttataggagtatgattttataattttaaattgatgtttatgagtaaggaggaattgaaggataaaggtaagattattggggttttagtaaaggtaaagatggttgggtggtgagatgagtggagagagtatttgtgttatagttttgagggagtttagagatgaaattatgggttttagattttattgtagtagttgtgattttttttatagttggtttttgggttaggttataggtaatatttttttgaagattttttttaaatatttgtggtttttgttttattgtagttatttgagatgaaatatgatgaagagttatagaataaggtatatgggagtatggttatttagagatcgaagatttaaaatttttattgagaatatgttataaaattatattattttttttttgattatattattatttttatttaaggttttttattattttttaattttttttttagagtgtttagtaagaatgtttttcgtatttgatgttttttgtttttttttaagttatttgtttttatatttgtttgtgtaggtagcggtgtttatattggggaaggggttttttatttaatagtagttgtttttcggtgggttggtatagattttgtagtagggtagttattgtgttttttttagatttattgggttttattagcgtcgttatttcgttagggcgtagggtgaatgttagtttttagaggttagagaagtatacgataagaggttattaaggtttttaattttgagagtgttattgttttgttatatagtatgatgttttattttagaagaaaaatagggaaatatagaaatttttatttttttatatgtatagatttttgggtgatgtttttttaaggagtagagatagaagaagcggtaaagataagggtagagatttagtattattatgttatatatttgatgttagatattattaggaaagggaaaaattatattttaaattataaaggaaaaggaaagatggaagatcgaagatatagattttgttgtagtaattttttggaacgtgagagtatttttttcgaaatttttttttttattttttttggaagtttaaattgggtttttgagtttggggaagatttatggaatagatgatgtttattattgtttttaaagggttagggaggatatatgtttggtagtaagtaggttgaaggtaggaagaaaatttaggatggtagaattgtagttggggttagtggaatatagggagtggtaggttgtatttgtagtattaagatatttgggcggtttgggtaggtaaaggagatattttggaattggataaggttttttaagtgtaagggagttaatagattattgggtgggtagcgaggggtgcggtttaggtatttaaatattttttttgaggagtttatagttttttgtattttggggtagatggagagtagtatttagagggaggtaagaatagtgaaagtgaggtagtttgtttgttagtattatgtgaagtaagaagggtaaagaatggaaggatattatatagatggtgttgggttagaggaaggaattatattggggagtgaaggtggagggattttatttttatagtttgggtgaattgtatttggtagagaataaatgtgataaggtttttattgtttatagttttattggttattagttgtttattaatgtagaggatttttatttttagtagtatatttgaaatttataaagagattataaaaaaagggattgaggtagagaaatttggaggggatataaagaattatagttattaatttgaaggaaatattaagtttttgttttttaagtgatatcggtaggtttaataggtagataggagaatgaattagagattttatggagtttgatttaatgtatattatgtaagttatagttatttttattattattattattattattttgtttggggagtattttattttttataaaaggtttttatttatgtgatgttagttaatatatgaagagttttataaagaaggttatattattttatttttgaaaaatgaggaaataattagtcgggcgtagtggtttatgtttgtaattttagtattttgggaggtcgaagtgggcggattataaggttaggagattgagattattttggttaatacggagaaatttcgtttttattaaaaatataaaaaaaaaaaaaaaattagtcgggcgtggtggcgggtgtttgtagttttagttatttaggaggttgaggcgggagaacggcgtgaattcgggaggcggagtttgtagtgagtttagatcgcgttattgtattttagtttgggcgataaagcgagattttagtttaaaaataataataataagtaaaaataaataaataaataaataaataaataaataaagaggaaatagttttagagaaggtaaatttgttgttatgattataagataagtaaattgtattattaagttaggattttcggattattggcgtagttttttttttagtgtattatagatgttttttatttttggtttttattatttttattatttttattaataaatttataaggtattagtatgaagtagttttaggtgtaagaatttatggcgttttgtattttttttgagaggtaaaggaaggttttaggattggaagatacgtatttttttaatttatatggttgggtggattttatgtattatattgaaaggaagttatttagtatttttaaagagagggagggggttagggatattgagtagagttattgagttttaggttgttaggacgaaaatattgaattaattattttttagtaaagaaggagtgggagtagggttataggaatgggaatggagttacggtattttaaggataagggaatgggtatttatttttaggtgtttatattagtggtttaggagttgattgtataggttatagtttttttttggttgagtgtttttattttttgtagtttttttttaaatttttgggtttcgtttttttcgttggtaaagtttcgaattgtaggtatggtcgatagagttttaatggttatttggttggattttgttagagattttcgtatttgtatttttagtaattgtggatatatggataagagatgttatacgggttggtaaattattagggatattaatatttgagttatttatttggaaattaaaggtgagaagagatagaggaaaaggagaaaagagaaagagatatagttatgttttttggatgttaaagaaatacgaggaagaggaaaatgatttagaacgggttggggattaaatttttaaagatagattgtggggagaagttagaaaagaagatttagagagtatggaggttaatgttgagtaatttgggaatatggattatagggatagggtgttttatgaagatggagaattagtaagggtgttaggaaagttggattgaaagtaatgtgagaggaattgagtttgttaagtttgggagatgagggtttgtgtagagcgggttaattttatgaatatatttggtattatttttttatttttttgggtagaaggaaaagtagaggtagggtgattagggtgattatggtgagggatattgatttttagagtatgatttttaagagatataggtttcgtattaggtattatagaaataagtttagatttttatttagagaattatttagggtggacgtgttttttgttattcgagatatgatgttatttgtagggttggggagaagagagtgaggtgaattagataggttttaagtgatgagacgaattaataatgagttaggatgttagggttaggggtgttaatatggggttttaaggaggttgtaggaaataaggttagggttttttagaggtttgtaaattttagtgtagggaagatgagtgttaaagaggaaaggtttgatttttattttaattataaagttattaatgtatatgtgaatttttatttttttgaaagttttttgttttttagagaatttgtatgttttatgttatatatataggtaggaagagtttaaattggttatataatagagatggaggaggagggtgttgttaggaagtatgttaaagtttgtggagtatttattgggattagggttttaattttaggtttatttttagttatatgtaattgtatagtttttagtgttgttagaaagtatgtcgaagtttgtggagtatttaagagattagggttttaattttaagtgtgtttttagttatatgtaattgtgtagttttagtatttagggttttggttttagtttttttttttgttagatgaggtagttggtttttatgagtttaaaatttttaggtttgaaattttatggtttttatttaaggatatataggaatagatttataagaaaatgttagatgaaaattttaggttttttttaaggtaaggaggataatattttgtttttgaggtatattaagaatgagaaaaataattgtgtgtgtgtgtgtgtgagagagagagagagagagatagagatagagagagagagatagggagagggtatattaagaatgagaaggaataatgtgtgtatgtgtgtgtgagagagagagagcggggaggggggagattaaagtagatgtatgaggatatgaatagtatatggcgtataatgaaagagttttaggagaaatttgtttggttttgttggaaaaatttcgttttttggcgtaggatagttttaaatatttttttttgtaagtggttgtgtacgtggtttatggtgttgttatagatttcgttatttacgaattttagtattgtattataaagaattcggaaaaaaaggggattagggtgtgtttagggaatagattgaaggttttaggtatttttatataagtgtatttcggatagtagttttaatttttaatttttttatttgtagggtgttttatttttagtttttagatttggttatggtgagaatggatatgagagttaagtttcgagtgaaggtatcggttgagttattttgtagaatttagttagtgaggcggttcgtaaagaatggaatggttattttttttggagaaagagaagagaggttacgtataaatattaagtttaagtaggttagttttagttagattggttttattacgtttttttttttttattattattttggagggtattagtagaaaggaaatattgacgttttaatttcgaatttaaataggttgttttggaatttattattttgtggttgttttattagaatttttaggattttattaggaaggttggagattatgaagtagaaaagttttttgttagagatgaggatgtttcgtttttcggttttagagtaaaggattttttcgttttcggcgtggtttaaagaattaagattcggttagtaatggagtttagaatttttggttttcgttagtttagtgtcgttttttttatatcgaagtggtgttttaagatttacgttaggagtttttttttcgttttatattttttagaatttacgttattttattttattgataattatttttgatttttgttttagtttttttgtgttttttttttttgttttgcgttttttttattaagagaggagaggattattaggattaggaatagcgagaggcggcgcgttttcgagtttaggtagtttagaagtcgacgtatagggtttttagagtcgttttgatcgtcgggtatttagaggttttcgagtttgtgttatagggttgttgcgggtagtgtcgttgtataattgataacgaaggcggtagggtgatttttttagtgtagtagtttggtgttattcgcggattcgggggttttttatgagattagttttcggaataaggtaagtttcggtagggttaagtttagtgtcgtagttaatggttttaaagtagttagttagttttgggtatttgcgttttcgtttttggagttaatcgttgttttgaggatttcgtaggtttttagttagagtacggtttagcggtttaggtttatcgtttagattcggagtagtggtagcgcggtgggtattagtagggagaatatgcggggtagcgcggttcggagtagtatttagtcggcgagaagtagtagtattgtttttagttatgcgagagaagtttcggggaggtagcggtattcgcggggagcgggatatttagagttagttattggtattcggacgtcgtttcggtttcggtcgggtttgggatttttcgcgtttcggtggggtttgaagtttcgggtatcgtcgagtttttttttattggcggttgggggagggaacgagggcggggttttcggaaagttttaggaataggttgattttgcgttggcgagaagtttagttatttaggggaaagcgaaatcgaaagcggtcgtttgtttattagataacgtttatttttaaaagtggtttgtttagattattttggtagtaagcgtggaaattagatttgagaatttcgggagtagttttggtgtttaattttttttattacgtatatttttttcgtttttttttgttttttgtttttttatttgtattagtttttttattttagttttagggcggggttgtttcgttatttgtttcggggtagatttgttttatatacgttagcgtcgcgcgtaaagtagtttcgtagtatttaggcgttttttggcggcgtcgcgaaggggcggggttgtcggttgcgcgttgtgcgttgttttaggttggaaattagtgttttaggcggcgaggagagcggtgttttgtagggatgttgcgggcgggagtattaatcggggatttatttcgggcgggagaagtttatatcggggtaatgggtttgggtttgagggttggtagaggggtggaggagatgtagcggttaggggattttggaagcgcgcgcggagaagtgaatgtagagattaacgggagcgtagggaggtcgtttgtagtagttagcgtttgtaattcgtaatgagtatagagtattttttttttgaggggggtcgtttagagtgttcgtgaagggaataggtacgcgaggttggtggaaaaagcgggtgttttgatttttagttggaagcgttaacgggaagttattttaaagcgttttcgtttttattttggtttcggatagtgggggttggttaaattaagaaagggggttggggatggtgtaaagagatgaggaaatggtgttttgggtgaagtagaatagtatttgggagaaggaaatataggtatttattgagaaggattaatttattatatagatttttgataaatttgttattgggtaatttttagtttaagtattgataatgggcgttttgtgttaattagtgatgtttttttttagtttgatttaggaaggtttttttttggtttagatgttgttttatttttttttttgtgttttttttgtttatttttatgtgtttattggggggattttgtttaggatgggcgtttggggtagatggtagttttaagattggttggttggtttttgttttggattattgttattattcgtggtttgggggcggttttgttagagaggaatagtttttaatttgaagttaattttgttttttgattttttatttatgataagtcggttcgtcggaaagtatatttagaggagcgttttttggggttagagtaatttacggtttggtaagaaagatatagtgaaattatttataatttgggaaatttttttttattgttaaatgagtagtggtaagtaggaagtagaagtggaaataagggataagagttagatttgaattttagttttaggtttattattaattttgtgtgattttgtataagtcgtttgtattttttgtgatttggtttttttatttgaatcgaggatttttaaggttttttttaatttaatagtagaataaatgtagttttatttttttttatttttttttgattttttttttgatttggaaaagttagtttaaattttttagttaaattattttttggtataaatttatttttttggttgttgagatatgtatttattttttgatcggaaattttataattgaaatttttatttttaattatttgtatgtgttttttgttgttttttttttgttttgtttttggttatgttaattattgtttttttcgattttttttaatgtttagtaaattggaagagtttatttttgatgaaatggggggtgagagtggaggattgtggattaaaaaaaaaaaaatagattgattttgttttttaagattatagttaattattttgtgttgggtttatattatatttgtatatattatgagttttttcgttggagataatttttatttgcggagttgttttatttttatttgtaggagttttatttttatttttttatagtggagaggattttattaggtaagttggaatttagggatatagttttttttgtgttgtattatagttgggttgtggtatttttttgtagtcggatgaagtaatagagaaagtggaaagatgaagggaaaaaaagtttgtattgatagttagttttggtttgttattgtgtaatttttgagttagttatttcgtttttttgggaatgtttttttttttttaatatgagggtattaaggttgtttttgttttgatattttatattttgtgtttttgtagattattattatggtagtggagtttgacgggggcgttgtgatgggttttgattttcgagtgtttgtagggtgagtaaaagtgaagatgtatgtatttggaaagaagttaatggttttaaatatatattttttttatttatttatgaaaagattggtaaattggagttttggaggaatggagttgattttttttaaaagttattatgataagttatttggtgggtgtttgggtttttgaatttgtggaggaggatttggggtttgaatgtgtatgtgatttgttttagtagtgtatagggatgagtaaaggaatagggtttgagagggggataggagatagatttttgagggttttttttttatttgtgtttagggattaaaaagatgattttgttaagtagatatttggttttttatttattatatattgaattattttgtttttttttttatttttaattaatttttttatatgtaaaatgagtatatggggttaggttaatattattgatattatgttttatagaatataatttttttaagattgttaatagtaaagaaaattgatgaggtatattttttttattttagtattttttgttttgttataaaatttaagtttgaaaaataagtttaattttgattaatatttgtagtgattaataatatttgagatgattatttgttttttgttttaatttaagtattaaattttatgttatttttttgttaaagaaatttgagagatattgaatgattatttttaaaaatttttgagttttggttgggtgtagtggtttatatttataattttagtattttgggatgtcgaggtgggtagatatttgaggttaggagtttgagattagtttggttaatatgttgggattttgtttttattgaaaatataaatattagttgggtttggtggtgggtgtttgtaattttagttattcgggaggttgaggtaggagaattatttgaattagggaggcgaagtttgtagtgagtttaagattgatttattgtattttagtttgggtgatagagtgagattgttttaaaaaaaaaaaaaaaaaaaaaaaatttgagttttaatttggtgattgttgatttttttttgatagcgaggcggtggtgaatcgagtgtttgataagttgttttcgttgtacgagcgtatttattgtgtattttttggtttagttgttgatgtttaagtcgtggtcgatatggtcgtttattagttggagttttatgggtatgaagttttggagttttgattttttatttattagagtttttttaatttgtatgaatttttgtatagtgtgttgttttaggagttggatattgggaaatggaaaagttttgtttcggtttttgttggtatttgaatttgttagtttttgtatttgtaaagtggagataatatagtattttatgagacggttattttgagaattatattttatatgtgaatatagtttaaaagttgtaaattattattttgatataaataattaggaagaaggtgatattgtgatttattataatattaggtagttattatacgagaaattaaggtcgttgggacggaagtaattttatttgtttttttttataagagtagggtttttgtagttaaaagaaagttatgtgggtggggttgagtaaaagagtgagtaattgaaagttttttattagttggtggtgtgggattttggtttttttgtatatgtgggagggaggttgtagtttgagttattgtagttatagtttttaggggtcgtttagtagggatgatggtaatagtataggagaatgagatttaaaattttattaatttttatttttaatattttttttaggatagaattggaggaatttttatttgttttggttgttgtaaatgtggtgagaaatattagttataaatatcgagaggatttgtttgtatattttatggtagttggttgggattaacgtgaaggaggttaggtgagttttttttaaagtatttttttttttgggtttttttatttttttgtagaggaagatggaagttttatgttattttagtaatgagttttaaggatattatttttgaaagtatagtattttggggatatgagatattagggttttattgtagggtgtagagattatttaatgttttagtgggaaggaagggtttgatgattttttaatttgaggattttttttttaggtatatggaattttgggaggaatgttgattcgatagttttttgttattggtggtttcggtagtatttttatttatggttatgtggatgtagtatataagttaggtatgtttttcgaggagtgtaggcgttttattatagacggtaattagttaagtggaagggtatttggggagggttttgaaatatgggaaggaagtagattatgaggaataggaagagaaatataggggtggttatttaagttaatgtcgggtttggtatatttttaagagtgaaaaggggtaggataaatgtaaagtttaatggggtttttgggtaatacggataaattagggttgttttgagtaaattaaatgaggatatatagttattgtgagaattagtggtgtgttaagtatagtggtttatatttgtaatgttaataatttgggaggttgaggtaggaggattatttgagtttaggagtttgaggttagtttaggtaagatggtgaaattttgtttttataaaaaataataaaaaaaagtaaaaaaaaaaatgaattgggtatagtggtgtatatttgtagttttagttatttaggaggttgaggtggaaagattatttgagtcggggagattaaggttgtagtgagcggtgattgtattattgcgttgtagtttaggtgatagagagagattttgtttggagaaaaaaaaaaaaaaaaagaattagtggtgtgttgaggtgtgttgaggttggtttgggattatttatgagagcggattgttaaatagttaaggatttgtgaattgtttagttatttgtaatttgtaatttattatagcgggagtatttatattacggatattagtagatgttatatatggaagtttttttgtaaaaaaattgatttattagtatattattaaatatgtttttttggaagatgagttttgaggtgaaagtggtagtaggtatatggatggagggggagtaaaaagatttttgaagttaagttattttttttttttttttttttaatttgaaattttttgtagttattgttttggttatgagtcgggatggtttaagcgggggtgttatttatttggttattattatagttgtcggtgtggattatcgagttattttgggtaatgaattgttaaaattttatgatgagtgaattttttttagattttttttttttattttgtaataaattttttagggttaaaatttggtatggttattgggaaatgagtgtttagggagatggagtttaggggaggtgggtgttttttttttagatgttagtatatattttttttttttttgttttaggtttaaaatattttttttagagaaaataaaagggattaaattagaaatataaagagttttatatatgataggtgattacgtattgaatgattttgaagtagtataaataataaaaatttttatttcgtattattatgcggtttatgatgatgaggtcgtaagtgaggtgatgggatttttttttttaaggttaagattgatagataggtaagatatttatatatatgagaattagttaagattattagtaaattcgtatgtaaaagaattttttttataatgtatttatttatattaaagggtaatatatgaaaaatgtttaaatattttggggtatttgtgaattttaaagaataatgataataattaaaagaagttatatttgtggtattggttaaatgttttataaattttattttttaaaatttaaattaaaaaattttttgtatttatatttgtaattttagtattttgggaggttaaggcgggaggattgtttgagtttaggagttagtgattagtttgggtaatatagtgagaattttatttttataaaaaaatttaaaaattagtcgggtgcggtggtgtatgtttgtagttttagttgtttgggaggttgagtgggaggatcgtttaggtttgggagtttgaggttatagtgagttgtgattgcgttattgtattttagcgtgggtgatagagaaagattttattttaagaaaaaaaaaagaaaagaaaaagaaaaaataaataaaaaaaatatttaattttatataggtattattattatttttataggatatatagaggtttggaaagattaaattatttgattaaggttataaaataagttttgaggttgggatttgggatttagttttattatatgttttttttttattattttttaaaattttttatttttttaatttttatatattattttaaaatttgtaataaatagttttatatattcgttggtatttaggaaattgttattagatggttgagtaattgtattaaaataaatttaattttgtttttatttttgttttgtattttttgagtgataggagtgaatttttatatttttttttgttaaaagatggtgttgaatgatttttaaggtagtttatagttttaatatttaatgttattttgttaataagtgggtagttaataggtatatttaatagaaatattagtaggattttaggttaaatatacgaatttaaaattttaaaataattatatttttttggagtgtaaagaaaaaaatttaaaattataaatgtttggagttgtttttagttatgatatttaatttatttgagattttaaatagtttattttttttattgattataagtagaaattttgggtagtatataaaaagtaagtatttaaggattttaaaaagtaaataaaagtaggtggattgtgaagagggttaaaattgggagaggggttttttttggggagtgggtttttaatgttttttttttttttttttttagttttgttttgacgttaggttttaggtgtagagttgtattgcgtggtagtataagttttgagttaataagagaaatatcggttttttggttagaggaatgaagaaaaagggtttttgcgggtaggaatgtgtaggggaatttttaaattgagagtataggcggaaattttttaattttgagtttgaatttttaggagtattaggttatttttgagttgtatatgcgtgtgatatgttttaagggtatagtaaagattttgagaattgaatgaagattagattttttaaaattggaagatttcggttaggcgcggtggttcgtgtttgtaattttagtattttgggaggttaaggcgggtggtttatttgaggttaggagttcgtgattagtttggttaatatggtgaaattttatttttatttaaaatataaaaattagttgggtatggtgtttgtaattttagttattcgggaggttgaggtagggagaatcgtttgaattcgggaggtaaaggtggtagtgagttaagattgcgttattgtattttatttggacgataagagagaaattttattttaaaaaaaaaaaaaaaaaaaaaattagaagattttatttttttgtattggttaaataattgttttaatgttttttattttaataaaaggtttgtagtagtttatagagataatttaaaataatttttaaaagaagaaaataatattgggttagagagaaaatatggttaagaaaagtaagtgaagttaaggagtgaaattaatggaaattaatggataacgtgaatattttaaaaaaaaaaaaaagtggtgcgttgttttatattggttagtaagagtagattgtaaagtatttaggatttttgaagatagttgttaattattggtaatttgatattgattattatggaagtatttatattatagaaattagtaatgttataagttagaagtattgtttttttttagagagtcggtttaataggatatatatttattagttaattataaatggataaaaaataattggttttaggttataggatagtgaaagtaaagaaggaaataaaatgaggtataagatttataaaatttattttttaaaagttgttagaaaattaaaaattatatataatagtttaagttatatagaatatttatttaaataggatatgtattattttataaaggtaacgttaataaattttagagtatcggtattttagaaattatttatattttaggttaggagtagtggtttatgtttgtaattttaatattttgggaggttaaggtgggtagatttttagagtttaggagtttgagattagtttgggtaatatggtaaaatttcgtttttataaaaaatttagttggatggggtgtatttgtaattttaattagttagaaggttagacgggaggatcgtttgaatttaggaggtagaggttgtagtgagttgagattgtgttattgttttttagtttgggtaatagagtaagatattgttttaaaaaaaaaaaaaaaaaaagaaaaagaaagaaagaaattatattttgtaattatattgtaataaaattagaatttgataattaaaatatatttaaaattgtaagtgaataaatatatttattagtaatatggatttaaaaggtagtcgtggatgggagtatcgttggagtttagaagatggaggttgtagtgaggtatgattgcgttattgtattttagttttagtaatagagtgggattttgtgttaaataaataaatagtagttataaagaaaattaatttttttagaattaggtgttaaaaatgttatatataaaatatatatataaaataatattataattttaaatatatttattagaataagaaaagttaaaataaaggatttagaaattttatttaaaaatttggaaaaagagaagttgagtaaatttaaagaaatacgaagaaaaggagttataaagataagaatagaaagtaatgaaatagaaatagagaataaaaaattaggtagtgaaaattaatatatttttgattttaaaagttgtttatttaaaaatatttgtaagatatttagagttataataaggtcgattatggataaagggagaaaaaatgaataaataaatatataatgaaaaagggggaatagttatagatatgatatagatataaagtatagagtgttatgaataagtatatgttaataaatttgaaaatttaggtgagataagtaaatttttagaaatatttaatttattaaaattagtataaaaagaaatataaaatttgattatattaatgagtattaaagtaatttttaaagttattaatggtatttaataaaaaaatatatttttgaaaatgtttagatggttttatagatgagttttattaaatatttaaggaatatgaaatttttatattatatattttttttagaaaatagaaaaaaattaaatttgattagttaattttattagtcgagtgtaattttgattttaaattgagttgtggaaaatttaaggaaaaaaaaataatagatttattttattttgaatatagatgggagaaaaaaataattatttatgaatcgaatttaataatattataaataataatattgggaggtcgaggtgggaggatcgtttgaggttaggagtttaagattagtattgttaatatattgagattttgtgagattttgtttttataaaaaattaaaaaattagttaggtgtgatggtgagtatttgtagttttagttattagggaggttgaggtaggaagattatttgagtttaggagtttgaggttgtagtaagttatgattgtattattgtatttcggtttgtgtaatagagtaaggttttgtttttaaaaatatgtataataataataataataataatgattatgttaataatgatatattaagattaaatagggaatttttggaatattagggtggtttaatataataaaatatattgttgttataatttattatatttatagaaaagttattttttttgtttagtttattaataaaagatatttggtaaagtatatttatttgtgatttttgaaaaatagttaaggaagtaggaattaaaatttttttattttggtaaaggttataatttaaaaaatttgtaattattagtatatataacggaaaaattttgggtatttaagataagaatgtttattataattattagtttattatagtattaaaaattatgggtaatataataagattttatttattaaaaataaatttaaaatattttaattagttggtatggtggtatgtatttgtagttttatttatttgggaggttaaggtaggaagattgtttgagtttaggagtttgagtttattgtgagttgtgattatattattgtattttagtttgggtgataaaggaagatcgtatttttaaaaaataaaaaatataaatataattataaattagtattagattaatagtgattatgtattatgaattgaggaatattattaattttattatttgtatttgaggttaataatatgttaatgatttaaataatattatatttttgagagtaattttttttatatttttatgataaatgttagataattttttattttttttatttaataaaataaataggaaatataattaaagagtttaattgaggattgggatttagaaaggaaggtaggaattaagaataatttttagttttttttttaatttgtattttttttattgatatatatgtattattttttttttatgttttttagaatttaataaatatgttttatattatataataaattagaatatatggattatttttggttttttttattaagtttttaattttgttggttttggggtattggatatattatgtaagaagaaaaatgttttaattttattgaatttatttagaagtatcggaaattggtttagtaatatttaattttgtttagtaatgtttatgaaagttttatatatagtatagtataagtatgtgtaatatagaatttatgtttttaaaaatgaagagataaagtatggagattttaaattttgttgatatagaagagggtggatttttcgaagaaatagttttttatagaaagtggtttgtatgagtcgggattttttagagaagtagaattaataggatgttggtagagagagatttattttaagtaattggtttatattattgtgggagttggtacggtcgaaatttgtaggtaggttggagatttaggaagagttgatgttgcggtttgagtttgaaggtggtttagaggtagaatttttttttttttggaggattttagtttttgtttttaagatttttaattgattggaagggttatttatattatggagggtaatttgttttatttaaaatttattgatttaaatgtaaattttatttaaaaaatatttttattgtaatatttagattggtatttaaatgtttagaaattatagtttagttaagttaatatataaaattaattattatttggtttaaggtgaaatttttagattaatgtggtaggagtgttgaggaaggaagtgaattcggttttaattaagtaggatagtcgaattattattgaagtgtggtattggtttttcgttaaggtaatatgtggtaaggttttaggttaggataggtattaggtaaaagttgggtgattcgatggaggtttttgtgttaatttttagagattggttgcgttagattgtttttaagagtatataaaggaaaaaaagataaattaaaagtttttaatttaaatttaagatatgaatgaaaaattgtaaatgtttttatagtagttttaaaggttatttttttttttgtaatttagtatagatatggttgagggttaagttcgggggtttatgataaaggttatgaagttgtagaaatgtttgttgtattatttaatagtagttgttgtgataaggtaagatttttggttgggatagatcggattttgagatatgaaatagggatatatgagtagatatagagaagtttgagtgagaattatgaattatcgtattttttgagggtttttgttggaagaagtagatttatcgtattagttatttattgttatgtaatgaatgatattcgtttaaaataatagatatttattataaggtgttattgggataataggggattttttaatatggattgtgtgtttgataatatggtattaattttaagtattttgggggtgatgatagtattagggttttgtaggagaaatgtttttatttttaaattatatatgataaaatatttaggggttaagtggtataatttttatagattatttttaaattgtttaataaaatggttttttaatagtaaatggataaataaaacgtagtttattcgtgtaatatagtattatgtaaataatgaaattttattaattattgaaaatgtaataatatggacgaattttatagaaataatattaagtgaagaagttagatttgtagaaatatatattgtatgtttttattatttattgttgggtagtatattaattttaaatttaatggtttaaaataaaaataattattttattattttttatgaatttgtgaattattggattttaagagttattgatgtagtttatgaattaaaatatatatttacggtagttattttatttagtattttatatttgtgatgtttattggttgtttatgggatttgaatatttttagagtattgtgaaattttttttattttttgagttttgtttttttaaagtggaaattagaaagtttattttttttagttttttttgaagttagagtatttaagttttattaattaaatttatttatttaagattttagttataaaggggttataggaggaattagggtgtgggggttgtagagtattttttattgtatttatttttttggtaaaggtgatagaagaagtaattgttttttggggaagcggtgggttttttttttttttttttttttttttaagtgaagtttttgaaatagaagtggtttaggaggtgtttttagtggtggttgtagtaatttttaggttttaataatagaattaatagtagcgtttagaagttatggggtagtagtagtggtgtggtttattagatttgttttttgcgtggtttgattttgtatatatatgtgttttttattcgtagttttagtattttttttttaaagtttagttttgagagaaatttttttggtagattttttaaagttttattaaatttaaagagggaattagtaagaatataagagttttgatttaaagagtatttgaaaaatagagttgtatttttttgtgaggaaataatttttaggttagagatttaaaatggttaacgtgttagagggtaataaaattataattttggtgttattttttttatcggagaaaaagagaaagttagtattttttattagttttttgttgattaatttttaatcgtatagggttggtcgggttcgttttaggtaaattataatttttgaaatattttggttttgattaggtagaattatgagtaaaggtttaagtgtgatataaaataattaagtacgtataattttgttttatttataattttgaaatattttttttatataatttttgattttaaggggtagaattaattaaataaaattttttagaaatgttttaatttagttttatttattttatcgtttttatttggtttgttttagggttaaatttagaagtaaaattttttttaaaatgaatgtattgatagttattatgttagatttggagtacgaataagagtatttttttatttttattgaaatttatgtggttattaaaatatatattaataatatttttaatttggataaaattaatttagaaaattgagttattgttttttatttgttagtttttattatattgtgggtttgagatataggtagtttttttgatagtatagcgttaatttaaaatataaaaattatgttaaatatatttaattatttttagttttttttatagtaggcggaggaaggtgaaaaattaagttttttgcgttatttagtggttaaatgggtagtggttgtttagtgagaaaaaataaagatttgggggcgtgaaaaatagtttgatagtgttagtattttgaatttagggtatgaggttggaagaaggtaataataaaaaagaatttttagagaaattggttatttaagtgtataggtatttgagagtgagtaattgttataattttgatattttaataattagagtgataataaaatatttgaaaataaatataaagaaggtaataattataagaaattttaggtgttttagaagtaaatggttttttgttgttgtttgtttttaaaataatttaaaaatttgatgttattagtataaagtattaaaagttattaaggtattaagtgagagtattttgataagaaattatcgttagttgggtagattatgttaaagggaaagaaaaagttttttttttgttttaagtgtagagtgtatattttaagattaattttaaattataaattttttttttttttgtttattaattcgaatttattattacgtgtgtgttttatagaaatatatatatagttgaatgataattttgtttaaaattttttattttagttttaaaacgtagttaattttattaatataatatatgaatgtatatttatattaagtttattattttaatttgagttttgtaaaaattaaatatggataaaggtatatatatagaaagttatttagtgatttaataatttttttttttatgatatatttaagaattttttagataataaaaagttatttattaattagtttagtgaaaattagtttaaagtaataaaattatttgaggttgtaaaataataatattattattgatattaggagttttttaaagaggtaaaattttaaaatttttatatagagtgtaagttaagtagttaagttaaatgatttgtaatatttttttgaaatttataagagttaatagtttaaaaaaagtattttataatatttaattaaaaatatatatttttatttaagtttgttttttataaattattgatatatttattgatatagtgaatgagtttagtgataagaaataaattttttttgttaggttatttttaatattttgtttttaataaaataaagaggatttatttaagttgttagttattatattatttaaagtaattttgggaaggaggttaggtaggaggatcgtttgaggttaggagtttaagattagttttgggtaatataatgagattttgtttttatgaataataataataaaattagttaggtatagttcgatgtgttatagttttagatattttgaaggttgaggtaggaggattatttgagtttaggagttcgaggttatagtgagttatgatcgtattattatattttattttgggtaatggggttagttaaatattatagaaaaaattgcgattttatttttattagttaaggttaaatgaggagtttagatttttatttttattaggttgttataaggaatttaatattttaatatatatatgtatatatattaggatggtgttagagaaagtgaatagggagttaggatggttatgtttttttggtgaaaatgtatttttttttttaagtttttgaaatgttaatggaaatttagatttttattttttatttaatagtaatgaagtattttttttttttttttttagggtgatgttagataatgtttaatggagagttaggatttttattattatttagagttaatttagtaattattttttgatatttattatttatttttttattttattgttttattttggtgttaataaaggttatgtgagggatagtaagtggtattttttttttaattaattagggaggtattagtgggtatttaatagggagttagaatttttgtttttatttagtaataatggggatttatttgaggtgttaatgaaggtagagtgagaagtttggatttttatttttatttggcgttatgaagtttatttgtttatttgttggagaggtgttaaaagaagttagttaaaatagtttaaataagattaatagttttataatataatgtttgaaatgtttaagttttaattggaaattatttgttatattaggaattaggaatattttaaattgaatttttaaaagataataaaatagatgttaaaacggaaagaaaagtttgatgaagattttaaagttattattattaaaatgttttgatgagtaattaatatttaaaagaatgaaaaaaataggatgtttagtttagtggtttaaaaaaagaaagaagaagaaaagagtagaaaagaaaaaaataggatgttttagtataaaaataggatatatacggaagaaaacgtggaaattttagaattgaaaagtgtaatagttaaaataaaaagtttagtaaataagtttagtagtagaaggagagaatagaggaaagaattagttattttgaagatatagtaatagtaattatttaatttgaataaaagaaagaaagaaaatatattggaaaaaatggataaagttttagggatttatggggttataataaaagatttaatgtttatgtatttagagttttaaaatgagaggaaaaagagagtgaagttgaaaaaaattattaaataaatatggttgaaaattttttaaatttggtagaagatataaatttagtgatttaagaaggtgagtgaattttaaataggataaatttaaagaaagttatattaaaattatagtaattaattaaaaattaaagataaaaagaattttgaaagtagtgagataaatgatatttaataggtgaaaaaaatgatagagtaaaatttttattagaaattgtgtaagttcgaaggaggttattatttttttttagtgttgaaaggaaaaaaaaatattaatttagaatattatattagtaaaaatatttagggaaattaagatatatagagatgagggaaaattaatagaatttgttattaataggtttattttaaaaaaataaaaagttaaattgaggatagttggaatattaggaaggaagaaagaatatggtaagaaaaaatatgggttaaaaaatggattttatttttttttttgagttatttaaattataggattgaagaaaaacgtataatattgtattatatggttataaatgtatatagagaaaatattataggtaattataaatgagggagggtaaataaagagagaagaaatttttatatattatttagattggtaattaatgataataaataagttatataaatataatgtaatatttagaataattattaaaagagttatttaaagaggtatatatatatatatatatatagttatagataaattaaaatggaattttaaaattatttaggaagtaatgaaaaagaaaataaagaaatgaaaaatagagagaataaatagaaaatagaaaataaaatgttagatttaagtttggatataataatattataggaaatataaatcgtttaaatatattaattttaagagatagagtttggtagaatagatttaaaaatatgattttgttaggtgcggtggtttacgtttgtaattttaatattttgggaggttaaggtaggtggattataaggttaggagatgattattttggttaatatggtgaaattttatttttattaaaggtataaaaattagttagttgtggtggtataagtttgtagttttagttattcgggaggttgaagtaggagaattttttgaattcgggaggtggaggttgtagtgagttgagattatattattttatatcgttgtattttagtttgggtaatagagcgagatttcgttttaaaaaaaaaaaaaaaaagatttaattatttgttgtttatgataaatttattttaaatataatgatataggcggtttataagttaaaggatagaaaaatatatattagataaaaaataataaagggaggttatattaatattaaataaatttagaataaagaaaattattagaaatggataggaatattatgtaataataaaagggtaaatttattaaaaagatatagtaattttaaatatgtatgtattaaataatagggttgtaaattatgtaaagtaaaaattgatagaattgaaaagaaaataggtaagttaataatgatagttgaagattttaatagtttttttttaataattgattaaataaatagataaaaattgagaaaaaatatagaagaataaataatattaaattataagatttaattaatatttatagaatatattatttaataatagaagatatattattttttttttcgttgtttttagtagattttacgagatttttttttttttttttttttttttttttttttattttaagtttaggggtatatgtgtaggtttgttatataggtaaatagtgttatggaggtttgttgtatagattattttattatttaggaattaagtttagtatttattagttattttttttgattttttgtttttttttaatttttattttttaataggttttagtatgtgttttttttttttgtgtttatgtgtttattatttagtttttatttatgagaatatgtagtatttggttttttgtatttgtaatagtttgttaaggataatggtttttagttttatttatgtttttgtaaaagacgtgattttattatttttatggttgtatagtattttatggtagaatatattttttttttttttttttttgagatggagttttatttttattgtttatattggagtataatggtataatttcggtttattgtaatttttgttttttaggtttaagtaatttttttgttttagttttttgagtagttgagattataggtatatattattatgtttggttaattttttatttatttatttatttatttatttatttatttattttttgtatagatgaggttttattatgttgattaggttggttttaaatttttgattttaggtgatttatttattttagttttttaaagtgttgggattgtaggtatgagttattgtatttagttagaataatatttttttaagtgtttatagaatatatgttaagatagattatatttaagataataaaagattaataaattttttaaataaaattataaagaaagtgtttttttattataatggaattaaattagaaattaataataggaaaatatttaaatatttggagataaaataatatatttagaaatatatgggttaaggaggaagttttaaggaaattttttaaaaatatatataataaatataattaaataaaaatgaaaatatgttatattagaatttgtgggatatagttatagtagttataagaggtaaatttaagttttaggatatatgtataggatgtgtaggtttgttatataggtaaatatgtgttatggtggtttgttgtatatattaatttattatttaggtattaagataagtatgtattagttattttttttgatgttttttttttttttaatttcgttttagatagattttagtgtgtgttttttttttttttgtgtttttgtgtttttattgtttagtttttatttataagtgagaatatgtggtgtttggttttttgtttttgtattagtttgatgaggataatggtttttagttttatttatgtttttgtaaataataggattttatttttttttatggttgtatagtattttatggtgtatatgtatattttttttatttagtttgttattgatgggtagttgggttgattttatgtttttgttattgtgaatagtattgtaatgaatatataagtgtatgtatttttataatagaatgatttgtatttttttgggtatatatttagtaatgggattgttgggttaaatggtatttttggttttagatttttgaggaattgttatattgttttttataatggttgaattaatttatattttattaataatgtaaaagtatttttatttttttataattttgttagtatttgttgttttttgagttttaataattattattttgattggcgtgagatggtattttattgtggttttgatttgtatttgagaagtaaatttaaagtattaattgtatatattggaaaagaggaaaagttttaaattaataatttaaatttttattttaagaatttagtaaaagaataataaaataaaaagtaagtagaataatgaaattgaaaatagaaaaataaaagtaaaaaaaaattaatgaagtaaagagttggttttttgaaagattaataaaattggtaaattattagtaagatttagaaaaaaagacgatagaagatagaagttattaatattagaaatgaaatgggatattattaaagattttatagatattaaaaggataataaaagaatattatgaataattttatatatataaatttgatatttaaattaaatggattatttttttaaaaaatataaagtgttataatttattaaatataaaataatttaaaaatgtttatatttattgaggaaattgaatttataatttaaaaatttataaaaggaaatatttaggaataaatagttttaatgaagaattttattaaagatttaaagaagaattaatattaattaattttttttagaaaatagaagtagaggaagtattttttagtttattttataaagttagaattattttaatattaaaattaaataatgataatgggaagaaaagaaaattgtagattaatattttttatgatgtagtaatttttaataaaatattagtaagtggaatttattaatatataaaaagaattatatataatgattacgtgagagttattttagggatgtaaagttggttggatatttataattaattaatgtaatttattatattataggttgaagaggaaaatttatttgtttatattaattgatgaagaaaaagtatttaatttattttaatatttatttattatttttttttaattttagaaatataggagtagaggagatttttttttatttgataaagatcgtttataaaaattttatggtgaatatatttgattttgaaagattgaatagtttttatttaaaattaggaataaggtaagaatgtttatttttattatttttatttatagtgttggaagttttagatagtgtaataggtatgaaaaaggagattaaaggtatatagattgtgaagtaagaaataaatagtttttatttgtaagtgatatgattgtttatgtagaaaattataaggaagttatagaaaaatttttagatatgtgattttagtaaattaatagaatataggataaattagtattaattgtatttttatatatttataatgaataaatgatatatatatatatattttttttttttttttttttttttttttttttgagacggagttttattttgtcgtttaggttggagtgtagtggtacgatttcggtttattataagtttcgttttcggggtttacgttatttttttgttttcggagtagttgggattatagacgtttattattatgttcggttaattttttgtatttttagtagagacggggttttatcgtgttagttaggatggtttcgattttttgattttgtgattcgtttattttggttttttaaagtgttgggattataggcgtgagttatcgcgtttggtttaaaaatataaatatattatttataattatttaaatatatgaaatatttatgtgtaaatttaataaaatatgtaagatttgtaagttaaaaattatgtaatgttggtgaacgatattaaagaagatttatttagtttttatttatgtggagagaaatattgtttatggattggaagatttaatatagtaaatatgttaattttttttaaattaatatataagtttaatataattttaattaaaatttttgtaagatttgttaattataggtaggattattttaaaatttatatggaaaggtaaagggattagaatatttaaaatattttttttttatattattatattttattgtagtatgtgtagtgtatattaatttaaagggaaaaaatgtaaataaaatgaaagatatggggaaaatggtattttgttttaatttttaatttaaagttatttttaataatttatttatattattatgttaaattgtagttatttttgtagaattttagataaatgaaaatggataaggtaatattaaagagattaagtatagaaagtgatattgattaaaaagttgaaagtaaaatttattttggttggaattgaatatttagatttatttttagaggaaaatttaatatgaattatatggtttttattttgattagtttatagtatattaattagtaatttatgatttgaaaatatttttttttagttgtatttgattatttaaaattttatcgagtacgttgtttggtatgttttatttttttgaaattattatttattttttaaaaattagaaaattagtttgtttgtgatttaaaatttaaaaaagtttgtagaaaatataaaaagaattaattatttaaagttttattttttttttttttttaaaatagttatttttattaaaagaagagtatgtggatattttttaagaatttaaaaacgagaaaattaaaattagagggtgtatgaatatatgtgtataggtatgtatagatttaatttttatattttttaaaatatatttaaataggtaattttagtattttaaatttagaaagtaaaaataaatagttttgtttttaaattagtggtattattagttgaaatgtttagtagaatattgtatttatagtttagtagtattttgattatgtattatttaagaaattaaaataataagtatatttttttaatagtaaagaattgttttattttttattttgatatattgatatttttataaatttgtaagtggaaaataagttgtttaataaaagtttttttatatatataatatatagaaattattttagaagtttgtttatataatagattattttggtattaataaaaattgtatataatttattagttgtatggttagaaatgaaattattattaaattaagatatatagggtttttttgtatttagttttaggaaaaagttttaagtaatttttattgtgttagaagaataaagtatatttgttatagtatatattattatatttttttaaagtagggattaaagtttttaaattaaataatgtttaggtttatttttgtttgtatatttaggaataattatattattggttatatataattttttttttatgtaaaaaaaaaaaaaaaaattttaaaaaaaaaaaatttgttgtttttttaagtttaattaagttaaataaattattaatagtaatttaattagtaagttataaattagagaggtataaaaatttagtagttaaattgtattttttatttatagtattgttgttatttaattattttttttatgtattagaagaattaataggtattgatggttaaaataagaattttaatattgtagtaaatgatagaagagtgagcgaaagagtttttaatgtgtgatagttttaatgattttttaaaaggtaaaggattgtatgtatgtgtgtggaaaggagtaggaaataaaagtaggaggttaagataggtatttaaagggaatgttaagatagttgtattagaatttttattttttaaaaaattgaagtttgtttagagtattaaaaatattaaaaaaaaagagtagatattggtgtaagtttaatttgtgagaaaaaagttagttttgatgagaaaaagtttagttttttttttgtaaatataaagaaatgtaataggaattttaaaggtagtaggttagaaaatgtaatagtaatttttataatttttttttttttttttttttttttttttttttttttttttttttttgagacggagtttcgttttgtcgtttaggttggagtgtagtggtataatttcggtttattgtaagtttcgtttttcgggtttacgttattttttttttttagtttttcgagtagttggaattataggcgttcgttattatgtttggttagttttttgtattttttttagtagagacggggttttatcgtggtagttaggatggtttcgattttttgatttcgtgatttatttgtttcggttttttaaagtgttgggattataggcgtgagttatcgtgttaggttataattttttttaattaaatagataaattaagttgaagataagtgttaaaatattatttagtttgaatatttattagtatatatattttgttgtttaattggtttttggttaaaaaaaaaagttaataaattttataagagttattattatatttagagtgatgaaaataaattagttttttttttttaaagatattgtttaatttttaaagtatgaaaagttatataatatataaattaattagtatttttataaaagtaatatagttttggattgatgatattatatcgtatttgtggtaaagtattaggtataagaatatatatattaattaggtatttttagtttaattagtttttaaggtttttatttaatttttggtaatatataataattggtatgtattttggtatttaagttatgatttgtggagaacgagaagtaatgtattatagtaacggggtttatatttaataaataataagagtgttgaataaattttttttatgaatttcgtgatttattttgttgttggttatttgtagtagatttttgatttgattttttcgtatttatgttttttttatgtgtagtttttaatatttttttaattttgttattatcgtgtaggttttttgaaattaattgtttagttagtttgatattgagttttttattgtagtgaagcgttttttttattttaaattgtcgttttttttttcgttttttaggtgagaggttattatttttttttttattgtttttttgtttttgaatttgatattttggttttaagtttttagtagtagttaagtttttagtaagttatttgttgttatagttttagtggtttttgtattattatatgtatttttattattatttatcgtattatggtaaggagtgtttggtttatttatttttattaaattatagtttttgtttgttggacgatatgtcgttaggatgtttattttattttatttttgggattttttgtttagttgttcgtggatatttttacggggatgttcggtcgacgttattatagaggaagtcgtagaggtgttgttttttaggatttttttgaggggtcgttgcgaggtcgtggaggtcgttattgtcgggtgtttcgtttgtcggtttagggtcgttgtttggcgtggggttcgcgaatagaagggtcggtattagtagagattagtaggtagacgcggagttcgtttaaggttaaagcggtcgtatttgttgtttcggaaaggggtatcggagcggttgttaagatataatgatttcgacgttagatttaagcggggaaaagcgggtttagagttttagggcgggagcgacgtcgacgtttaaaatatttttgaaaaagaagaataaagtgagttgaaaattagtttgttttattttaagtattgttttatagttatagtaattaagattgtgtgttattagtagaggaatggatatataaattagtggaataaaatagagaacgtagaaaaagatttatataatttgtttaaatgatttttgaaagaggtgtaaaaggaagttagtggaagaaaaatagttttttttataaatagtgaattgaataatggtgaaatggaataattgggtatttataggtaagataataaaataaaaatgaaatttgatttaagttttacgttttatgtaaaatttaattttaattggattggattgtttgagtttaggagtttaagattagtttgggtaagatagtaagattttgtttatatataaaaatgaaaaataatgttggtgtggtggtttttgtttgtagttttagttatttgggatgttgaggtagaaggattgtttgagtttaggagttcgaggttgttataagttgtgatatattattgtattttagtttgggtgattgagtaagattttgttttaaaaaaaaaaaaaaatgttagagaaatgtaatattttaatttttattagatataattaattaaaataaataaataaaatggattatggagtaaatgtaaagtataaaatttttaaattttagaaaaatagaaaatatttgagatataggtttaggcgaagaatttttaggtttgatattgagagtatgatttatgaaaggaaaaattgataaattggattttattaaaatgtaaaattgttgttttgtgaagatttggtaagtggatgaaaaaatgagttatatagtaggagaaaatatttgtaaattatgtattgaataaaggattagtatttagagtatataaagaatttttaaaatttaataaagaaaatatattaaaaatttaattagaaaataggtaaaagatttaaggtaatattttattaaggaggatataaaaatggtaaattagtatatgaaaagttgtttaatattattagttattagggaaatgtaaattaaaattataatgagataatcgttttatatttattaggatggttaaaataaaaatagtgataatgggttgggtgcggtggtttatatttgtaattttagtattttgtgaggttaaggtgggtagatgatttgaggtcgggagtttgagattagtttggttaatatgaagaaattttgtttttattgaaaatataaaagtagttaggtgtggtggtatatgtttgtagttttagttattcgggagattgaggtaggagaattatttgaattcgggagatagaggttgcggtgagtagagatcgtattattgtatttagtttgggtaataagagtgaaatttttttttaaaaaaaaaaaaaaaaggcgataatgttaaatgttggtaaggaagaagagatattggattttttataatttttgatgggaatataaaatggtatagttattttggaagatgatttggtagttttttaaaaataaaataaaattaataataataataaaaatttaataattaagtatattattattattttgtttagtaattgtatttttgggtatttagttttaagaaatgaaaatttgtatatataaatatataagtatagataatgtttttatataaaattttgtatgtaaatgtttgtttaattgtttatttattgtagttaaagataatttagatattttttaataggtaaatggttaaattaattattgtatatttatattatgaaataatatttagtaataaaaaagaatgattgatatatataataatttggatgaatttttagagagttatattgagtgaaaaatgttagttttaaaaggttatatattgtagtgagttgtgattacgttattttattttagtttgagtaatagagtaagattttatttttaaaaatagataaagaaataaaaaagatggattatagagtaaatgtgaagtgtaaaattattaaaattttagaaaaataggagaaaatttttgagatgtagggttaggtaaagaattcgtaggtttgatattaaaagtataatttaggttgggcgtggtggtttacgtttgtaattttagtattttgggaggtcgaggtaggtagattattgaggttaggagttcgagattagttggttaatatggtgaaattcgtttttattaaaaatataaaaattagttaagtaagacggtatatgtttgtaattttagttattcgggaggttgatttatgaatattattcgaattttggaggtggaggttgtagtgagttgagatggtgttattgtattttagtttgggtgatagagtgagattttattttaaaaaaaataaataaataaataaaataaattttattgaaaagaaaaaaaaagtataatttatttgtataatattttgtattaagaagtttgaaatgataaaagtatagaaatagagaaaaaatttatagttgttagtggttaaggaagtgatgggggtgggaaggaggtgaatcgattataaaagggtaagataagggatatttggagtgataaaaatattgttttgattgtaatattgatattgatataaatgttaatattttgattgtaatattgtattgaagtgttataagatgttattattagggaaattggattaaagggtaaaaggttttgtttgtattattttttataattgtatgttattttttaattattttaaaataaaaagttaaatttaaaaaatatgtatgaggatgtgtatagttttttaaaatatatttaagaagtttatgagtggaaagtttgagtgaataaaaattatatttggaattttggtttgtaaattagtttgggaaatgtagtttgatttagtgtgatttagttttatattattgtttttagttttgttgttgtttattgttaacgttgaagttaaatattttttgagttgtagggtaattaagattttatgatttaatgttgtttttatttattttggtttttgagagagaataggaaagaagatggagaagaaggattttttttttgttttatttttttttttttgggttgaattgtgtttttttataagtttataatgttgaataaatttagtattttagaacgtgaattttttttggagttagagtttttaaaaagataattaagtgaaaatgaggttatgaaagtaggttttaatatagttagtatttatataaaaagagattaggatatatatatatagggggtagtttataggaagatgtagggaaaagataattatttgttagttaaggatagagatttcggaagaaattaattttgttgatattttgattttatatttttagattttagagttaggcggtaataagtttatgttgtttaagttatttagtttgtggtattttttatggtagttttagtaaattaatatatttttttatatttggatataggtttgttttttttgattaaaggaatgtaaaaataagattgttgttaaagttttaataaaattttatgaaggtttgggtaaaattgaaaaggaaaagataatagaaaatttttttattttgattatagatattatagatgtaagagattataggttttagttatttaagggttttttaattagaaatagatttggtatggttgatgttattaatatttgttatgttttttgggttttattattgtagtgtatattggttggatatttgtattatttttgaaggtttttttaaagttaagaagggttattttgttcgatttatagtagattagaagggtcgaagagtttacgtgttaggtagtagtttttaattaatgggaattgatgtataattgtttaatttttttttttcgtggttgggttaattttgaggtaagtgtttttttagaatttttttaggggattaagttttagttatttatttttcgttggttgttttttttttttaattttttatttagttgttattgaagttttatgtatttttaaaataaattatttttatttatgtttttgtgttagggatgtttttggaagaaattaaacgaatgtatttcgggttagtttttaatttgttttatagtagtaaaggttaatttttttttgtattatttaagagaaaatttagttattattttattatggtgtttggatttttagaattttgttttttatgaaattttgatttttttttttttttgttaagatttttttttatttagtatggatgatagtttattttattgagtattaagaaaagagagtttagaaattgttagaaatatttttattttatttaaatttgtaatatttcgtagattagaaatagtatattttttgattttatttttgtatgtttaaaatatttgagttggaggaggtattgattttttgttatatagtttaattggattatagagtgtaagattttaaaattagtttttgatattttttttgtttttagtttgtggatttttattatttttatagaagaaaattggttttaagattattcggagtattttttaaatttattatttatggaataagtgttgattttagatatttagtaatttaaggttttttatttttaaagattttttttttatttggtttttattgggttttttattttatttatttatttatttatttattgagataaggttttattttgttatttaggttggagtatagtgatttgaatatggtttgttgtatttttaattttttgtgtttaagtaatttttttgttttagttttttgagtagttgaaattataagtgagcgttattatgtttagttaatttttttttttttatttttttttttttttttttttttttttttttgtagaaattgagtttcgttatgttgttcgggttggttttgaatttttgggtttaagtaatttttttgttttagttttttaaatggttaaaggtatgtgattattatatttggtttattatggtttttaaatgtaaaattttaaatgaaaaattttaattttttggttattgttgttttgttgtggtttgttttttatggtatgaggggaaatgcgttatttgtttttgttgtagaaagatgtttgaggaaaataatttttagttgatgttttaggattttttttgttatatatttggaatgtgtaaaagtataggaaatattttagtataatataaattatatatagttatttttgggatttagaatggaatggggaggagggagaaataaaggagattttttatttcgtatttttttgtatggtttgaatttgttgttttttttttatagacggagttttgttttgtagtttaggttggagtgtagtggtataattttggttgattgtaagtttcgttttttgggtttacgttatttttttgttttagtttttcgagtagttgggattataggcgttcgttattacgtaaggttaattttttgtgtttttagtagagacgggggttttattgtgttaattaggatggttttaattttttgattttgtgattcgttcgttttggttttttaaagtgttgggattataggtgtgagttatcgtattcggtcggtttgaattttttataataagagtgaatttagatatttattatgtaatttttttatttagtttaattatttagattaaatgattagaagaaataggatttaaaaagaaatgaatgaatttttattagggggtggtagagaattataatttatattatagtttgaaattgaagggtaaaaggaaatagttaagtttagaattatatgttgtagtttatttgtaattataaatttttattaattagtttagtgtgagatttaatttttttataaatgtttaataatatataatatgtttttttgagtaacgttttttagattatgtttttatatagttttttatagttttttatagtttttttgtaaattgggttgagatgtattattaaatgaaattgaatgataggagtttattgtggttggaatagatatatatagtgattgatttaggtagattagaaggtggatggatagatagatagatagatagatagatagatagatagatagatagatatgcgtatatatatttttttttttgagtttttttgggtaagtcgaggtatgagtattttgaaggaaaagtaattatgagtgagttgtagtatttttatttaatttttaaatttaatttttgttgtaatatatatagaaaaatgagtttcgaattttttttttaatttttaatatgtaggtattatgtttttgtttagtttttttatttatgttttttattatattttatttttaattgaattttatttcgatttggttaataggtgtgagatttagatatttttattcgggagatgttatttttttttttttagaggttagaggtggtttttagtaattatttgtattattttgtaggggttttttaaatgcgtggttagatttattttattgtgtttaggtgttaatatggttttttagttttattttttttgtaatttaaaatttgttagaattggatagtagtttgatttttgaattagatcgtggtttatgatgtttgttttttatttttttattagttgtgttttatttttttttgattttaattattatagaaaagataagttagatttttttatcgttgggtaaagttttaagtaaattgtattgggaatttttggtattttaataatggtttattgttttttttgtgattaatgggtaatataggtttgtttatgagtttaagtttttgtttttggattatgtaattttaattgttttgttattttattttaattttggtttttatagtattttttttattgtttatttttaaatttagtgtttaatttattattgtgtgttttttttaatttttagattaagtattttttggtttgtttatttttttatttgggtattttggattttagttagaggtggtttttattatttggttttttttttagtgtttttggatttttttggttcgtaattgtttttgttgaaggttatttttttggttttatgatttttatggttgaggttgttttattatttttggagggaaattttgttgttttttgtaaatattttttttttatggtatatttatgtggaattgtgttatttttttttttatttattttgaataaattgagtatttttggattagatattagtggaagatttttattggatgggggtgggatgatgggttggtgagagaagatatgggtaatagtaattttttaggttttataatcgaaggattaattttttattattaatacgtaaattttattttaaaatacgttgtatttatgttttttttaatttggggaatttaatttattttaggaaggattttattacggtgttaggattttttgtattttagagggaatttttgttatttgttattttggaatttttaaaataaagtttgtttttttaatatgtgggtttttttttgttttttttagtatttgggttttattgtagtttaggttaattgttaatagttttaatttaggttggtttttatttttagagagagaatattttcgggtttttttcgagatttcgtattattagttttttttacgtttttatttgttgttatagtaatattttggttttttatgtttagttttgtttttcgttgttttaagtataaatgatatgtaatttgggatgtaattatattttttgttttttagttttattaaaaatgaggtttttgtgtggtttttttttttattttttttgttgtattatatagagaaatgaattttgaattgaattttttttatatttttagtaaaaatataatttttttgaattgtaattttgattttttttttaatttaaaaattagtgagatgtttttaagtttttaagtggaggtttttttgttagtattgttttggtgaggttttgttttgttttattttagttttgttttgtttttttatgtatgtgttttatatcggtgagagaatatagttcgtgtagtttttaatttttatttaattttattttgtggtttaatgtattatgtttgggaaaatatgtatttattatttgttgagtatataattttataaatatttgataatttaagattattatttgttttagtaaaatattttatatttatattattttataattggatatgatagtttagtttaaaagtatgttaaaagtttttaaatgtgttaatttattttttttaataaagtatatttttttttttaatttttaaagatttgtttaggatatgaaggtttataatttatgggtagttggtgaattgtatattttagtataataaagtatttttttttgatattgaaaaatttttttattatttattttattttgtttaatattagtatttgtaatggtttgaatgtgtttttaaaaagtatatgttggaaatgtaatatttaatgtaatagtgttagtaggtgaggtttaatgatgagaggtgtttaggttatgacgattttatttttataaatgaattaatgttaattataaaaaggttaaaagtttgtgaatttaatttgttgtatttgggcgtttttttttttttttttttttttttagttttttttttattttttttgttttttattatagtatgaggtagttagaagatttttgtaagatgtaggttttttaattttggattttttagtttttaggattgtaataagttaatttttgttttttaaaaattatttagttttggatattttattatagtagtataaaatggagtaagatagtatttttatttataattaatttttgttagtatttgtttgagtttattattgtttattggtttaattattcggtgttattttgttttaggtgttttttgtttgtttttgtttttattttgagatagggttttagtttgtcgtttaggttggagtgtaggggtgcgattacggtttattgtaattttaattttttaggtttaagcgatttttgtattttagtttttttagtagttgggattataggtatgtataattacgtttggttaatttttttatttttgtagagatagggtttcgttatgttatttaggttgattttaaatttttgggtttaagtgattttttttttttggttttttaaagtgttgggattataggtataagttattgttattagtattttttgaatagtaaatatatatatatatatatagattatttttattgagtagaaaaatttagatttaatgtaatgatataaatggatattataaatgtatatatatttggattatttttgttattatatttttatatttattatgtttttttattttttagttttttgttttaataaattttattaaattgtttttgttatttttgtttttatgtaaatgattttttatatattttttttttttttttttatgatttagtttttgaaatatttttttataaataagtaatgtatgtgatgtatatttataagaattttaaatatttatttttttttattagttatatgaaggaatggaacgttatttttaatattaaagttttttgtatttgtttttttttagaatttttttttttttttgtaaaatgtaattattattttaaatttggagttgattattattttgttttttattatagtaaatattgtttttgtttgataataaattaatattataattaatattaaaatgtagttttttgttgttttttttatttaataatatgattttaagaattatgtaagtttattattttatttgtattttattgattttgatgttgtagagaattttatattatgattatgttaaaatttgtgtattagtttatttgtaaatggatattgggttgtttttagttttttgtaattataaagaatgtttttatgattttttttgtatattgtttttggtgttttatttaataatttttttaaggtgtatatatatttaagggtagagttgttatgttttaggatatttttagttttaattttataaaatgttaatttttttttaagtagattattttagtttgaagtttattattagagtatgagttttttttattttatatttttattgatttttgataatgttagattttttaatgtttgtttatttagtgattttaaaatgttattttaaggattgttttaatttataattttttgataattattgtgagtttaatttttgtacgtttattggttttttatatatttttttttgtgaattgtttttttatattttttgattatttttttatggggttatttttagatgttttggatattgattttatgtaaattatgtgtgatataaataagtttagattgtggtttttttttttttagagtgtgttttgattaaagtttttaattttaatgtggttaaatttatttatttttttttaatatttttgtttttaaaatgtgtatgtgtgtttttttaataaatatttttttattttgaagttatataaatattttttttatatttttatttaaaagttttatagttttgtttttaatacgtcggtatttagtttatttggaatttattatgatgtatatatatttattaatttagtgttataaatttaaatttattgaattatatattttttatttattggtttttaatgattattttttatatataaggggttttgatattttttttattttattttattggtttagttgtttatttttttttttattaataatagtatatggttttaaatttagtggtgtatataatatttttttatgtagttaggaaattttttaattttttttttatttttaatggtattttggttttttttgaatttgtgttttttcgttttattttaatattattgtgtttaattttataaaatattttgttgaaatttttttagaaatagtatgaaattatagattatattggggaaaattggtattttaatgatattgatgttttttaattatgaatgtgtttttttatttgtgtagtatttttttaattttttttaatgattttaattttttttattaagattttgtatgttttttttttttgagaatttatttttgattatagtggattttttaataatgcgagggttagtagcgttgattatttgtgtagttaaaaatttgtatataatttttgatttttttaaaattttattaatagtttattgttgattagaagttttattaataatataaagttatttaatatatattttatatttttatgtgttatatattgtatttttatagtaaagtaagttagagaaaagaaaatgttggttaggtgcggtggtttatggttgtaattttagtagtttgggaggttgaggtagaagtgtttgagataaggagttggagattagttttagtaatatagcgagattttatttttataaaaaattaaaaatttagttaggtagggtggcgtgtatttgtagttttagttatttgggaggttgaggtggagaatcgtttgagtttaggaggttgaagttatagtgagttatgataatattgtattttagtttgggtaatagagtaagattttgttttagaaaagtaaagaaaatgttatttaaaaaattataaagaagagaaaatatatttattatttattaagtggaagtggagtattataaaggtttttatttttatgtttttatggtgaatatgttaagaaggaggaaggggaggagaggttggtttcgttgttttaagggtggtaaaggtagaagaaaattatatataagtagatttgtatagtttaagtttatgttgtttaaaggttaattgtattgtaagtttgttatataaattagttaattatatttttatttttttgtttttatagaaaatgtaatagatttgtttatatatttagttaattattgtgttaaatttttaatttttatgttttagattatttttttttgtagataattgtattatttatgaataatgaaagtttgttttattttatttttatttttttaattttttttttggtttgttgttaaaagtttttttattttatgtttaagtaataagtaattttaatattatattttattttatataataaaatttgattttttaaaagggtttgtttttttttaatttaatgttaatgttggaattttagtttttagttttgaaattttggtgaaaaaatttttagtaaggtaagaaggaaaaaaatgtttttttttgtttttgaagttggagagaataataaatgaaaattgttgttataaatggttatttttaataattttttaaatttttagattttaaatattttggataggatttgataaaatgatttttaatttgtaaaatatttgtatttttgattatttattttttttaataatttagttttttggtgataatgtttgagtttaaaatttttatttttagaaggtaacgtgatttgtgaattttttgttaaattaggaaagaattattggtattgttttttttttatatatgtataggataaaatagttttattggattttttattaattaaagagttcgagagatagttgaatggttgaattaagtagagagtggaaatttggggagggtaattttttgttgggttttaaaaggagtttataagataggaaaaaaacgaaaaagttaaataagatgaatttttatttaggttttaatgagaggttgtttgattttgatttttcgttagttggtttaaaattttgtttttaaagaattatttttatttaaaattaagaattgttagaaaataagaaaaattatggagttttgttgttgatttttatttttttatatatatatatgaaatatatattttttttcgatatatatgtatatacgtaaaaatatatttaattgaaataacggttttatgaaattatagttatttttattatttgtgatgtaggtaagtatttttaattgtattttattttattttattttatttggaaaaaaagttttttggttttaatataaatgggttttgatttgtagttttaagttaatacgttatagtaagagtaaatgtagggttttttttagttttatttggtagttttaaagttaggattagagtaatcgatggagtattatttgtacgttttacgtttgaggaggaggtttgggaaaagatttaacgtgtaggattggcgtagaggtttaggtttgtaattttagtattttaagaggtggaggcgggaggataatttgaggttaatagttcgagataagtttggtaaatatggtgaaatttcgtttttattaaaaatatagaaattatttaggcgtggtggtgcgtatttgtagatttagtttttcgggaggttgaggtacgaaaatcgtttgaacgcgggaggcggaggttgtagtgagataagattatattattgtattttagtttgggcgatagagcgagattttgttttaaataaaaaaaataataataataatttaatgtgtttttagtttggtttttagggttttagatgaggttcggaagtggatttaggagttttaggagcgtagttagtgttgtggatttttatatttacgtgatttgcggtttcgcgttattttatttagggatagatgacgttttttatttttatttattagtgggttggttaagatttttatttattaagttagttggagtgggtttaagtaagtttttagttaaggttgtggggtttggaggattagatatttcgattaaaagtttttttttttattttttttatacgtttgtcgtagaggtgtacgggtgcgagtggggaattgaggtaagaagtagatggggcggtatcgagagaagagaaattacgttagaggaaaagttcgagttgttatttttttcgatttttttcgtttttcgtttttttttttttttttttttttttttttgtttttttttagtttttttggtttaatttttttttgcgtttaatattggtatttttttttttttcggttgatgaataattgttcgtaaattagtttttttggggtattgaggggcgggaaggttagaaggagttagggttagagttttggaaggtggtagttaggtcgtagggttatagtagttattttgcgattttttttttcggtgtttttttagcgttaagcgggagaagacggagtttgggagttgggattggaggagcgggaagcgtagtatcgggattacggttttgggattaggaaaaacgtagattttttagagttaatgtttattttagttagtttaagggcgcgataatttggcgtcgagtattttaggtcgtcgcggggattttttttaagggattcgggaatatttgtttattttagaagaggcggagaataatttcgtagggagttaagcggtttttgtttatagcgtttttttcgtttttacggcgtcgagttttgattgacgtttagttaggttaattatagtttgtgtttgaggcgcgcggagttggagcgtttagggtatgttcgtcgattttaaggaggtaatttgttaggcgtcgttcgggcggtagtatgtttgagggggtttttcgtgttcgcgtttttcgtcgtttgtattgaaaggtttgtatttgagtttggatatttgaatagaggtagatattgcggtttaaaattttaagggtaggtgtttattgtgcggagtttcggaacgtttgtttggaagaagagtttcggcggtttttcgaacgtttggagaaagcgtttggatgtagttgtagggtgagatttgagacggtgattgtgttttttagtaggcgtttaggcggggtggtgaaggagggatatagatttttaaagatttttttttcgttggggtgaggtggggaatagtagtgatagtagtttttatttttgagtttttttcgggtcggttcgtggaggagagagaaggggagggagaagggtttgtttaggtttttagatattttattttgtgggagatgtatgtgttgagtgtttttgttttggagggattgttaaagaatttaggtttttggggagtgttttaggagaatattttaggtgatatttttattttttttatttttatcgtgttgggttttttttggatataatttgttttttttaattcgaggtggttttggtgtttggtagttgttttttttgttaggtattattttttgggttttacgtttttattttttaagttcgttgtttttgagttgttatttagatttggtttgtttttatttttgttggattagaagtttgtattaacgtttttattttattttgtaagatcggcgtttttaattaagggtttttttttttgaatttagaatttgtttggaaatcgagtattttttttatgtttaggtggagattgatgtttgggttttatattttttaattttgttgggtattatgtcgttttttagtttggttgtatgtgtttttattgagtggatcgtatttttagaattttttttaatttttttagtgtatttttttgtaattttttttttttttttttaaattttttattttttattagaaatgattttatttttgtgttatttattttggtttggagtattaaggagttatattatatttaatgttagaggtggaatagaaatgaggtttgaaatgggaattagaagttaatttgtgggaaatttttttattttttagacgtgtaaagatgtgttggagattttcgtaaatatgtatttagtaatgtagtatatatagtgattattatgtatttattttttatgggaattaataatttagaatgattaaaaatttttgtgtgtagagatatgaatttataggaatattatatatagtgagtataattgtgagtgaaattttatgttttatgtattttagtagttttaaagggagtttttaaatgtgtacgggatttagattttatgtaatttgtatttgtttatgtattagttatgtgagttgttattttagttttgatgaggttatttaggaagtttgggattttgatttttgtcggttattgattatttggttataggaaaggagatttaaatttagaatttaaatttatgaatattaggtttgtaggtattagattttagaagtaggtgagtaggtggttattggttggttttttttggagtgaggtagagatatttatgttatatgtaatataaaaggttgtttgagttttttagtttgaggtagagtaaggagggagaggtggagagggattttttttttagattagggaaattagaagttattagatgtttttagtagggaatttagtataaagaggattataagttatttttttatttttttatagttattatagacgtaattgttaatttatttttttttggtgttttggttagtagagtgaagttgagataatataaatgaaaaaattgagtagaaagggagtgaggatacggggtttttttagtttgttttatgggttttttattttaaatagatgaggtatataatattttggtagtattatattagggttagagttggtagtttatagatgtacgatagaggatggaaggagtatgttttttaggtaggtaagtttagtttggtagatagaggatgtggtttaaaagttattgtttataagattagtgtatgtaagtgagtttttgttgttgtttggattagaggaggtgaggtagaaggttgatgaaaatttattaattgatggttagttcgagaagtagttaagatggagaattgtaaaattaatagtttaagttttttaggagttttagtgtttaatgttaggtttattagggatgtttagtttttttggttagagttttaggagttttgtttgaatgtggattttttttgtttatttaaagagatttgggaagttgagttaggaatttggataatgattagaaagttatttagatatttgagaaatgttttttttatatttaagagatttttgtgtgtagaatatatgaatttattggaatattatatatagtgagtagattttttttatatttattaaatttttttcgtagatttattaaattttttattagtgatttaatggagcgaaattaggttttagattcgatttaaaaaaaaaaattatatatatatatatataaaaagttttttaggtgagtatgtatgtatgtgtaaatggtattatataatggtatgattggatagttaaaggaatatttaatttaagtgtatataaggagtaaatttggagttagaggaagttggttattgtaggaaagtaattgttgtaagaaagattttttagaatgtaattgtttaatatgaggtatttatgtttttttttttttatgtttttagtttttgttttgggtttggtatttattgtttattttgttttaagtataagattagtggtttattcgagggtttataatttttatttttattttggcgttatatagattattttttttttttaagttattgtatttttattggtagtaaaagaggataatatttttatttttaaataaattagtgggagggatttaaattatgagggaaaagaaaaattggtttttttgttgtagggaagggttattgaaaattaaaggataatttattgagttgaagagagttttggggtttggtaatttggggtgtgaggtggatttttaggaatgttatgggttttaagattagtgtgttttttttttagtatgtttttttttagtttgagaggattttttggtaaaggattgaaagaaatgtttattttattatgtttttgttgatatttagttttttttttttagttataagtttatttttttattggggtaatataagaaggaggaagaatagtttaggggttttttttttatattttttttataaggattgtgaaatgttatatgtttttttttatagatttagatagatttaaaattgttaatatgtgtttagatagttgtaaaaaatatataatttttaatatattttttatattaatattttaaaataaaattgttaatcgtttatatgtttaatttaatttaaatattataatgttttgatatttattattattaatttaaaaaatatataaataattttttttttaatggttggaaattttatattgttttttttttttattttgaatttatatttttattttattttttatgtagaattttttttttttttttttttttttttttttgagtttttaattttggttatattttaatgtaatttttttttttgtttttggaaattttttattgagttatttattttgtttttttgtaataaaatatgtttttatattgaatttttaattttttgttgtaagtgtaaaagttatatgggttgggtgtagtggtttatatttgtatttttagtattttgtgaggttgaagtaggaggattatttgagtttaggagtttaagattagtttaggtatatagggaaattttatttttataaaaaaaaaaaaaaaaaaaaaattattggatatggtggtttttgtttgtagttttagttatttgggaggttgaggtaggaggattatttgagtttaggaggtcgaggttgtagtgagttatgatcgtgttattgtatgtattttattttggatgatagagtaagatgttgttttaaaaaaaagttatatggattaagataggattattaattgttagagattaaaataatgttagtatagattggatatgttttatttgaaatgtttgggattaaaagtgtgttggattttagattattttggattttaaaatatttgtatatatataatgagatattttgaggtcgggatttaagtttaagtatgaagtttatttatgttttttatatatattatgtatatagtttgaaggtaattttatattatatttaaaataattttatatgtgaaacgaagttgtgttaagtatagtatttatatgtggtattatattggtgtttaaaaagttttagattttggagtattttagattttttgatgagggatgtttaatttgtaatatatattttggtaaataaaagtgtaagtttgtaatggtaaaatttaattagaaatgtattttttaatgagatggatagggattttatttttttaattttatgttgataaatgttatttattgttaatgaatttgggatataaatgaatgagaaaataaagatttgttgaggtaattttatttaatttttaaaatttttttttagtcgtatgtaaaatttatataatgggttattattaaataatatttttaataatttgttagttgataatttaagtataaggtttttttttaattttgttgaaagtaaagaattagaaattaattgatttgtaaaattatttttatatatatattaggtttttttattttgtttttagaattatattaaagattttataaagttttataaaataattaataattatatttgttgtttttttttttagagatattttgtttatgaattttaaattagataaaattagggttaaagaaaaataattttttatatataaaattggagattaaaaattaataggtttttaaaaaatatttttttattttttatgttatttggaagtgttttttaaaattatgatatagagatggtgttgtatagtttatagtttatgtgtgtgtgtgtttaattttattattgtataaaattgttaattttataattatgtatttgatagatgtaaaatagtgtgttagtttttaagcgggagaaattaatttaaaataaatgaagttggatttttaaagtttagagtattatatttaagattgtatttgggaatattttgttttgtatttatatataaatgaatttttgtttttaagaatataatttaatttatttagtggaaattaatagtaaaatgaaggagaaggtattagataattaataaatataggtttatagaaatttattattgattgttattatgtgtattaattatagtagaatttataaaatattttattaattaaattttattttaggaggtatatgataaaaataaataaatgaatagagaaataatagtatattataaattgttatttaaatagaaaaatatatttatattatttagaaatttttggtaaaagttaatgaaaatattttttttattagttagaagaagtttaagaaaatatatattaaaatatttttaatatgtgtttgttttattttaagatgtgatgttgatttgtgagaaattaattttgagcgttttgtttttattgttttgaaataatgtaaaataagtaattgagttgggggtagtggtttatttttataattttagtgttttgggaggttaaggagggaggatcgttggagtttgggtgatagaataagattttttttttttttttgtgtatatatatatatatttgtaattgaagtatagatgggatataggtaagtgggagaatttattaagttttttgttagtatttagagtgttttatagaaagttaatattttttaatttttttttttttttttttttttttataaatttagaatattttagttttgagataaaaattgggaattttagtatgagtttgttatttgaatgaaataaaaaaaattacgttgaaggttggtgtagtaatatgtgtttgtagttttagttattttggaggttgagttaggaggattatttgagattagaagtttaggaatttaagattggtttgagtaatatagtaagattttattttaaaataaatagaaaaaagttattatttttagtattttttgttaaagtaaaggagttatttgttttttacgatggttaggaaaggaagtattaaggttattaaatgaaaaatttttagtattttagtttttttgtttagggaaatatttgaatttagaatattataatatgagttaaaatcgttttattttttatgttatatgttatttttaatataaggttatttaatttcgagtatggttggtatttggggttgaataatttttttttgtagggggttgttttgggtattgtaggatgtttatgagttattttagtttttattatttattagatgttagtagtattgatttttgatttttttatttaagttgtgataattaaaattatttttggataatggaggaattttaaatgtatattgttaaggaaaagttaatttgaaaggattatatattgtatgagtttaattatatggtaatttggaaaaggtaaaattatggagatagtgaaaaggtagtggttattagtggtttatgggaagggttggatgaataggtggagtatagaggatttttaaggtagtgaaattattttgaatgatattgtaatggtggatatatgttatatttttgttaaaattaataaaatataataattaataaaattgtataaagagtgaattttaatgtaaattatggatttaataatgtattaatattggtttattaattttaataaatgtattatattaatgtaagatgttattaatagtggaaattggagggaagagggtttgaggggatatacgggaattttttgtaatttttgtttagtttttttgtaattgttaaattgtttaaaaaaagtttgtttttataaatggaggtatggttttatatggattaaaatattatgattgtttttttattttatatatggtgaaattagagtaggatatattttaaatttaaaatttataaaattaatttatgaaaatgtttatttagattaagaatattaaagaaatttagattaatattgttattttgaatttattttattgagtaattttttaagatttttttatatattattaatttagaaggatttttaaagtttttatgataattaattattggtttatagttaaattgtatatttttattaattagagttatatttttttattttttgatttaaaaattttaggaataggaaatgtttattttagaaaataagaatattttttaagtatttgttgttaatagttatttttatatgtgtttgtatttattttatatttgttagaatatagtatttatttttgaattaaggttttataataagtaagtattttttttatttagaagttatattttttaagtagaaaaattattaaaaatttagttttttgaaggttaatttttttaaattatttaatttaattgtttaaggtatagattggaattttttttagtatttttttgaaaataggtgatagtggaattttgttaggtttataaattttagattttgattatatagtttaggtttaaatttttttcgaatgttacgaatatttaaagtattaggagttttggttttattttttaatttttttttttttgggtatatttgagatttattttggatttaaataaattaataatagttttatgaaatcgataaaaatgggagttttattgaatatgagagatattgattcgtagtttttaatattttttaaatgaggagtttatttttaatttagatgttttttttaaaggaggtttttttttttcgttatttataatatagttatattagttttgaaaaaatatggaatagattttagatttttatattttatattttaaagtcgtataagttaatttgtattttttttagtggaaattgtatagttggttatttttttaggatttttttattaagaaataatgtagtttttatatttgtgttgtttttatattaaaatagttggaatgtatatagtatggttttggatgtttttgtatattttattttttattttttatttaatttatgtgttatgatttgaatgttttttttttgtaaaatttatgttgaaatgtaattgttatgataatagtattaataggtggaatatttaagaggtgattagggtgggattggtgatgttataaaagggtaagtttagtttttttttgttttttttgttatttttttatttttttttgtgtgatgatgtaataaaaaagttttttttagatgttagtattttgattttggattttttagtttatagaattataagttaataaatttttgttatttgttattagtttgtgatattttgttatagtagtataaaatggattatgatattatgtgtttatatagaaagaaaaaaatattatacggtaattgtttttaaatatgtagagaatatgttttgatatttttagtggatgtttgaaattgtagatagtattaaattttatatatattatgtttttttttttatatatatgtatgttaaagtttataagttaggtagagtaagatatgaataataattaataatgaaatagaaacgtaacgatgtgttgtaataaaagttatgtgattgatattttttttttttttttttttttttaaaatattttaatatttttaagttatggataattgaaattgtagaaagtgaaattgtagataaattattaattttatttaaataataaaagaattataattatatttttgggaaaattaataattatttaaagtttttttgtaaagggaaaaaaaatgtatgtattggaaaaaattttaattatagggttttttaagttttgtaaataataaatagtatttatttatttatttttagagagtaatagttttattgttatttagaaaaagtaattattttaggttgtaggttgtgtatattagtattttttagttttttattaatatgggaaaattgattatttttgattttagtttttgtgaagttaaatgtttgattagagtttaaattgaggttaattggagattataaaattttatagtttgttagaggtggattacgattttgattggaaattttttattaattaattttaaaaggtgttaatggtgattattttttaaaataaatttgaagagtaattaatatgataagattagaaatatatttttttggtaagtttttataaaaagaaagttaggtaattaaataattttttaataatattgttttaggaaatttaatagagagttttataggtttgttttttatgggattgtttaatgtaggtaaatattattaaattaaaaagtaattttgtaatagaaattttatagagttttaatattttatagaatgatgagtataatagtagaaataaatagaagataatttagaaaaataaagcgaataatttaatggcgtgagttaggttaagaaaagttttttggaaaaagatatttgaatagaattttagtagatatagttaggaatttttaagtaggtagaagaagggggatattttaggtaaaggaattatgtgaatgtaaaggtagggagttatgaattaatatgttcggtttttttgttgtttttgttttataaagagttataataggttgggtatagtggttgtaattttagtattttgggaggttgaagtaggtggattatttgagtttaggagttcgagattagtttgggtaatatggtaaaatattgtttttataaaaataaaaaaaattatttttgtttagtggtgtgcgtttgtggtttcggttatttgggaggttgaggcgagaggagtgtttaaggtgggaggtggagattatagtgagtagagattatattattgtattttagtttgagcgatagagagattttgtttaaaaaaaaaaaaaaaagttataataagattagtttattagataatatagtgaaatgggggaagttagagaagagaggtgggtagtggttttttatgttacgtaagagatttgatattataaagtaagttgttagagttttgaatgagggtattagaaatagtaatgaataggaaagtatatatttaagagttgtttgttgtttgggaggtggaatttatattgagtattgagtaatagaatgaaggggttgagggaaaggtaagaatttagggtgagtgtaaattttttggtttaggggataaataataggaagttattgaaatttattggtttattcgtattttgaaattatttttatttatgtaagattttgtaatattatatggttattaggaaatatttgtttattgaattatggaggtattcgaaatgtttaaatattttatgtaatattaaaaatttaaattggttgtagtggtttatgtttgtaattttagtatattgggagattaaggtaggagtattgtttgagtttaggagtttaagattagtttgggtaatatggtaagattttatttttataaaatttttttaaatttgttaagagtggagtgtatatttgtggttttagttatttggaaagttgaggtaggaggattatttgagtttataaggttgagagttgtatttagtgagttttgtttatgttattgtaatttagttttaataatagagtaagattttgttttaaaaaaatattatatttattaatgttgttgttgatattagaaaaaattttaagtattttatagtagtagatataagttttttaaaattttaatttttatttttaaaagtttaaattttagtattggtaataaatataattagttgttttttttaaagtgatagtattattgtttatttttaagaaaatgtttgttaaatttttaagtttgaataattaattttttgttattttttttttttaagtgaaaagatggtgtttttatgaaagaaaagaaaaagtggttaatttagtttgtaatttaaataagtgtttttttaaaagataattatattttagtatgtagtagaagtgttttatgggtatattatattgtgttataaagaatttttttaaatgtgtttaagggttgagatttagtagaaaataatttttataattttattaaggatattattttagtaaaattgtttttttttttattacgaatgtgtggtggtgaagaatataatgattattaataaaatttggtgttattgttttaattcgtgttaagatattagttattttatttattattggataaaatttattatttttgtattattagtgtaaatgttaatatagttaatatagttgttgaggataaattattagatttaaaaaagttatataatatttttaatgttttagaatttttgttgtttagaatttatataaaagaagattattaatggttaattgatgttgatatttgatgaatgaaagtaaaataggatgtatagttatttgtagattagtttttttgtaaggttaaggtataattttttagatgatatattaatttagtttttatgtttgtagttaaatttttaatttgataagttattgtattattggaaaatgttagtattatgtatttttgtggtgattttttatttagtaggtatttagtaatgttaattgtttaagtttttattagtttttttgtgattgtgtgtgtttttttagttaatataatatgatggtttattttgtaagaagtttttaaagagtgtattatatttatatttcggttatttaatttttttttttaataaattttgaatgattggttttaaaatgatattgtaattttgttggaattatataagtgtttgaaaatgttttattgtataagatataatatgataaattattaatatttataaagttgaataaaagattatttttaatatatttttgttgtgtatagttgtgtttagtttttttggaatagattttttttttttatgaggaattagataatttgttgatatgttaatgttattttttttagtatttttagatataggtaatttagatattagaaaatgtgtttttttttttttttttttaaagttaattatttattttatttagataaaattttttaattaaaaatatttttgaaaaatatattattgtaaaataataaagtaaatataatttttgttatgtttttgtgtaaaaggaaaaattttaggatttaaaaatgattttttggaagataatgagattatagagattataataggtataattgaagatagttggtaagagtatggtagaaaagaaataatttttgaaaattatatatttatatcgtaaatttattatttttgaaaattttagaaaatataatatataggtatataatttgttaggtattagagaaatagttattattatttattatatgttattgttgtttttggcgaatttttttgtatatttatgagagtgagagtaaaaaaaaggtaaataatattttaattttatgaatatttttgattttgttgattttttaaaaggatttaagggattttttttttttaatatttttaggaattttttgattatattttgagaattgttggataagttagttaatattgtaggaatataggttattattatggggaataaatgaaattagatttttattttatattattataaaaataaattttaaatgaaataaaaggttaaatgtgaaaaggtaaaggtttaaagttttgggggggaaatgtagaataattttattattttaaggtagatagtttaataatattacgtgttgaagtagaaatgtgaagaaatgggaatttgtatagaattttggtggaagggttagtttttttatttattttaattatttattttatatatgtagtgttgtataaatttaaagagataagaattttatagataagtaattttatgtttatatgttttagagatttgaagatatttttaaatataaaaataaagaagtatgtataaggatgtttattgtaggtttgtttataattggtggaaagttaggggatgtttattagtgtataaaaaagtaaataaaattgtgttgtttttttataataaattgtgtaattattaaaataaattaaatgtttatattttataaggataatttttataatataataataaatgatatgtattaattttaaattagtaattgtatttggtgagggaaaagaaaggtggatttgaagttaggtgtaaatagtataattgtatttgagtagtggttgtatgattgttgttttatgtattttttgtatgttataaatatttattattaattataataatataagatgtattttaatttttttatgttgttaattatagaatatttattttgttgattaaattttttagtatatatatatatatatatatatatatatatatatagtttatttttgttaatggttttttggataaataatagttgattttgtttttttgtttggtattttaaaaaatttattagtttataaattttttattaattttagttttaatatttgtattgttaagtattttaaatatatagaaaggtaaataaatttttattatttaaatatttagttttattaaattttagtattttgttttatttgttttaatggtttttttaataaattagtgattataataaaattgatatttttgaatttttttattttttttttattgtttttagatataattattaatgtgaagttagttttattattgttatgtatgtttttaatatttttattaaatgtttatgaatttttaaatattatgaagtattatgttatagagtttttaagttttataaaatattatttaatattgttattttaagaaaatttgtagtaattttttttgaaaaagattaattatacgtaatttgttatatattaaaataattgtttttaaatagtgatgtggttttgggtaagtttttttaagtttttgtgagttttagtttttttttatttgtgtggtaaaagaatatgagattatgtttgcgtttttttttagattataagtttttataaattatttaatttaaatgtttttatgggtttatttaaaggatagttttgtttatttatgaataattgtgttttattaaaattagaatttattgaatgtttatttattttaatttttttaagtggtttgttatagaattttttttaatgttgagatttttaaatatattgtaattatcgagaggatatttttgaatatttattatgagtttgatgttatgcgaggtgttagagatataagagggaatttgataggtatagtttgttttttataaagtttatggttgagtttttaaaatataatttaagttttttaggaatatagttaatttataaagtaatagggagaaatattttaatattaagaggtattgatgaatgaatgtgtgaataattaaattttgtaattttttttgtagatataaaaataagtatttattgtgttatttttaaataaaattattggtagagtgtagtttataaatgtttggaaatattttattaaaggttagaagatattttgttagaaggaagtaatgtttatatttttatattttgttttttttttttttatatatgtattttgttttatgtttatgttttttttttaataggttttgatatgaatttaaagtaaatgttttttattattttatttatttattgaatatatattgttttttgaatgttattttttttatttattagttttagtagtttgggtttgtttttatttttttttattttaaaatggtttttttaatttgtaatatagaatttagtgtttggttatatataggtaggtattgttttttaaaaatattggtttataaaatggaatgtgtatattatagggaatgtgtaaatgatttttgaggatataggaaggaagtgttaaagtttttatttattttggtaatttataaattttttatttgttatagtgtgagttttggtgtatatagttaagttatatgttagtatatgggataatgtataaataaatatgtaagtgtcgataagtatttaatttttttttattgagagggttttaggttttttttttttttaagttttaatattatagtttaaatgtgtgtgttggttttatttatgtaattgttttgtgtgtttttttagggagtggtggtgttttgtgttttttattttgtttaaaggattttgtatgtataaatgcgaataaatatttattgaattttattaataaatgattttattttttagattattaaattaaggattacgttttgaatatgttttggaaatatttttattaaagttaaaatgttttagaaatgtttaattaaaaaataaaattggtcgggcgtagtggtttacgtttgtaattttagtattttgggagatcgaggttggtagattataaggttaggagtttgggattagtttggttaatatggtgaaatttcgtttttattaaaaatataaaaattagttaggtatagtggtaggcgtttgtagttttagttattcgagaggttgaggtaggagaatcgtttgaatttaggaggtggaggttgtagtgagtcgagattatattattgtattttagtttgggaaatagagtgaggttttgttttaaataaaataaataaataaaattaaaagggaagataaagatatttttttttgtattagtagaaggaagatttaatgaaaaataaattgtaatagtaaatttagaagtaatattgaaagagtaattgggaagttttagatgaagttgttattagtttttttaaagtaatgaaatatttagttgttttatttaatttttatttggtataattttttattgataagaataatttataattaattagtttatatatgttttttaaattttagtgtatataagaattgttaagaagtaggtttaaatgtaaatttttaggttttagtttagggattttaatttagtagttttagaggttatttagaaatttgtatttttatgaagtattttggatgattttaatggatgttgtttgtaatataatttttagataaatgttttgtataagtatattttattttgttattagttatgagaatttgattaagaaataaatttaagaatttaattattagtttattattttaattatttttttttgttaattgtgattagaagtatgaaaaaaatagtttatgtttttttttagaggaagattatattttaattgtgaaatggtttagatattttggaattgaatatggattgtgattttgatatttttaatttttattgttttttatatattagttgagtattttataatatttattcgataaatttttttttggttttgagtttttttgtttttcgatttattttatgtagtttggttatttttatttttatgaggtgggttgttttttggtttttttattatttttaatagatgtgaatatgagggattttggagtaggggtagatattttagtgtaaaaatagtggatatttattttttttaagattttttattaattattttttaaatattttttaaatatgttttttttttgtatttttttttttagtggattaaattattgtttatttaattgtttgagtgagaagattggatttagtgagtttttaggttttattaagtttattttaaagtgttattttaatgattttattttttttgtttttaaatagtggtatatatggatattaagtattgtagtgggtttaaaattggagaaatggattttgaagttatttttttgtaggtataagagaagttatattgagttagttagagaagagaagataggaaaagtagaataaaatttttagaatatttaaagtattatataaatgtaatgttttattattaattgtgattttattttggttttaattttgtttagagaaatttgaatgttggagttttgggaattttaaggttttgagtaaggaatattttatgattttttgtttattatttgtttatttataatagaattttagtaatgaagagaaagttatttttgtaggaaaaaaaattttataatgtttattttatataaattagttgtgttttgggtttagattaatatatatatttaaaagatttggtgggttgttatacggtaatttatttatttagttttgtagaggaatattggatatggaaatatagtttgttagtttgatagtattagatatttttattaggagtttttatgtattttagatgttgatttttaatttttttattttatgggaatatgtatggttatagtagataagattataggagtaggggagaggtacgggggagttattttaggatggaagaattttttatatgataggaattatattttatattaatttatgagtgaggattttaagaaaataggtatattcggatttaagaaatatattataatagagtttagggtttatattttttaataggtttttatacgggtttggttatataggtttattaagtttaaatgtttgttcgtagtttgtttagtatagatgtagtttattaattaggggttatttttatatttataaataaataaataaataaataaatgtgattttttaaaatatagttgatattttatatttatttaaatagtatattttaaagaaatagtaagtataaggtaaattggagtttatttttttatgggaaaaaagagtttaaaattgttgttaattttttgatttattaataaatattgtttatttttatttaagagtttattttagttaggatataatttggtgatagttttttttggtagtaattattgagtattgtaaggagaagaaattgggatgggtgtttataaagagaaaaattttttttttaatttttaaatttaaagaaaattaatttaataagtatttgttgtaaatttagtgttaagtattgttatataggaagatgtatttgttatttgttaagatagattgagggaggaatgggggtagagattaattagaaaataggaaaaaacgagattagttggggatagttgtagtaaagtattttgaggatattaaatatttttagtatttagttaggatggtttaaaagagttaatttgaaagaatttataaattatatggatgtttttattataaattagaggaaaggtagatttatatattatgaagtttataaggtaaatattatttagtagtatgaatatagttttattatatagttttttaaaaatttatggatatttttttgaaagtatttttgaaggtattttttttggattttgtgaagtaaattagtttttaaggtgtatttagtaagggtttaatagagtgtataataaatgtttaatatatatttatttttttttttttttattatttaagttttatgtttattttatgaatttttaagttttttttttttttgtttttggagtatagatgaattagaatttttgtttgttattttattggatattttgaaaagagatttttggaatggttatgataatatattagttttggttacgagtgtaagattttgggtattaggaagttttaggttatgagttattgaatgtcgtttgttattttgttttttgaggattagaaataaagtttttagtttttgtgaaatggtaaataggtaggtttaggtttttagtttttttatttaaaattaatttttgtaaaggtagagaagtaaaaggaagtaaggatttggggagttggtaatattagaaataagtataaagtgtttttatatttgttaggagagatagaattgttgttttgagttggtgtgcgtagagaatgggtagggttgtattttgggagataagttatagtgggagaataggttgtaggaagattttttaatttttgtattatgttttttttaatcggtttgggataattgttgttttttttttatatataaataggttgtaataggttaggttatttgtatttttaaggtaaattagtagggaatagatgaaattaggggtgagtttttgggtatttttttttttattatttacgattattgttttaatttttagcgttggtgaattttaacgtggagtatttgtttatttttaattgtgttttttttaggagttgtttgaaagagtagtggtaaatggggagatttatagtgtttttgggttttttattagggttggatttggagggatatagattagtatttgattttattttttttttattatatattattttatagattagttggtgtttttttggagacgtgagtttatagattaatataatgatatggttaaggaataaaaaaattgtaaaatatagataataaattaatattatatattatttaatgtagaattgtgaagaagatgaattaagaatttgaaataaaatggtaaatatatttaagataatagaagatattagtaatataaagtaaaattagtaatttataaaaataaagatagaatattagatgttaaaattataatagtagaagttgtaaatattatagattagataagtattaggataaatatagttgaagaataatttgtgaggtaaaagataagatgaaagataattttagaagatagtaggaaagaataaagatattaaaaatataaaagaaagtttagtaaaatgtatgttagaaatagaagtattaatatttgaattataagagaatttatagtgagaggaaaaaaatatatacgtgagaaaataatgattaataaatttataatttttttttaattatgaaagattttagagaaaagggtttaaaggatatttaataggagttttagaaaaatttatatttatgttcgttatattgagataaataaatatttttaaaatttagaaagaagagtttattaattgggtatagtggtttacgtttataattttagtattttgggattttgggaggtagaggcgggtggattatttgcggataggagttcgagattagtttggttaatatggtgaaattttgtgtttattaaaaatataaaaattagtttcgtttggtggcgtgtgtttgtagttttagttattcgggaggttgaggtaaattcgggaggtggaggttttagtgggtgatagagtgatattttattagaaaaaaaaaaaaaaaaaagaatagtttataaaggagtaagattagattgatgttagattttttaatagtaatgaatgtaagaataaaataaaataatatttttatagtagtgaaggaaaataaattggagtttagaattttatatgtattaaaattgttatttaagtgagatggtataataaatttattattatgtaaagaatttaaaggtttatatttaaaatatttttggacgtggaaaaaaaaaaaaaaaaaaatatttttagaggaagtatataaaaagagaattaaattaagaaatttataataataaatataagggtgatttgttaataaatttaggattatatttttaaaagagggtaaatgaatgtgtgtgtgtgtaatatttatttggtaggagaattggtattagagggagggaagtagaaaattaaaagaatataagagtatgttaaagaatttaggaggtaagatataaatattaaggtagttaagatattttaaaaggtaaatgtttattgtgttaaattaaaggtaattattataagaatagaattagtatgtataatttttaatatagtagaaaaaaattagtttattaaatggaaagtaagaaaagggaagaaatattgtataataaaaatagaatgtgaaatgagttgtaaaagtaaatttttattttagtagttattaataaaagaataaaggttttaataatggaggaaaaagggaattaaattatgtgtgatttataataaatatttttttttaatttttaagtttaggggtaaatgtgtaggtttgttttataggtaaatttgtgttagggaggtttgttgtatagattattttattatttaggtattaagtttagtatatattagttattttttttgaatttttttttttttttatttttattttttaataggtttatgtgtgtagtttttttttgtgtgtttatgtgtttttataatttattttttatttataagttaaaatatttggtatttgattttttttttttatattattttgttaaggataatggtttttagttttatttatgtttttgtagaggatatgattttatttttatttatatttgtatagtattttatggtgtatgtgtattacgttttttttatttagtttattattagtgggtatttaggttgattttaagtttttgatattgtgaatagtgttatagtgaatatatgtgtttatgtgtttttataatagaatgatttatatttttttgtgtatgtttttagtaatgggattgttgggttaaatggtatttttgtttttgggtttttgaggaattgttatattgttttttataatggttgaattaatttatatttttattaacggtgtaaaaacgtttatttttttttataatttagttagtatttgttattttttgattttgtaatagtagttattttgattgatgtgagatggtattttattgtggttttgatttttatttttttaatgattagtgatgttgagtttttttttatatacgtgttggttgtatgtatgtttttttttgaaaagtgtttatgttttttgtttattttttaatggttttttttttttgtaaatttatttaaggtttttatagatgttggatattatatttttgttggatgtatagtttgtaaaatttttttttattttgtaggttgtttgtttattttgttgatagttttttttttagtgtagaagttttttagtttaattagattttgttggttagttttgtttttgttgtaattgtttttggtatttttgttatgaaatttttgttagtatattttgaatggtattgtttaggttgttttttaggatttttataattttgagttttatatttaagtttttaatttattttgagttaaggtggatggtgtaaggaagggatgtagttttaattttttgtatatggttatttagtttttttagtattatttattgaatagaaaatattttttttattgtttgtttttgttagatttgttgaagattagatagttataggtgtagttttatttttgtgttttttattttgttttattggtttatgtgtttgtttttgtattagtgttatgttgttttggttattatagttttgtatagtttgaagttgggtagtgtgatattgttaacgttgttttttttgttttagattgttttggttattttggtttttttttgttttatatgtatttttaaatagtttttttagttttggtcgggtacggtgttttaggtttgtaattttattattttgggaggtcgaggtagggggaattatttgaggttaggagtttgagattagtttggttaatatggcgaaattatgtttttattaaaaatataaaattagttgggtatggtggcgtatgtttgtaatattttagttattcgggagattgaggtaggagaatcgtttgaatttgggagatagaggttgtggtaagtcgagatcgtattattgtatattagtttgggtaataagagtaaaaatttcgttttaaaaaaataataataataataatagtttttttagttttgtgaagtattttaatggtagtttaataagaagagtattgaatttataaattgttttgggtagtatggttattttaatgatattgattttttttatttatgagtatgagatgtttttttatttgtttgtgttatttttgatttttttgaacggtggtttgtagttttttttgtagatattttttatttttttagttagttatatttttaggtattttattttttttgtgataattgtgaacgggagtttatttttgatttggtttttagtttgattgttgtttggtgtataggaatattagtaatttttgtatatttattttgtattttgatattttgttgaagttgtttattagtttaagaagtttttgggttgagataatggggttttttagatataggattatgttatttataaatagggatagtttatttttttttttttttatttggacgtttttatttgttttttttgtttaattgttttagttaggatttttaacgttatgttgagtaggagtggtgagagagggtatttttgttttgtgttggtttttaaggggaatgtttttattttttgtttatttagtaagatgttggttgtgggtttgttatatatggtttttattatttttgaggtatatttttttaatatttagtttattgaaagtttttaatatgaatgtatatggtaaatttttttaaagtagaaagatatgtaaagattgaaatttaaaaatagggaaaaaagatttatttggtggtaaatatgatataaaagaaagttgggtaatagttttaatatgtaataaaatagaattgatttttttttgggagggggatagagtttttttttgttttttaggttggagtgtaatggtataatttcggtttattgtaatttttgttttttgggtttaagtgattcgtttgttttagtttttcgagtagttgggattataggtgtgttattatgtttagttaattttttgtatttttagtagaaatagggttttattatgttagttaggttggttttgaatttttgattttaggtgatatattcgttttagttttttaaagtgttaggattataggtatgagttatcgtgttcggtttatgtattttatttatttatttatttatttatttatttatttatttttgagatagagttttatttttgttgtttaggttggagtgtaatggtgcgatttcggtatattgtagtttttgttttttggatttaatcgattttttttatttagtttttcgagtagttgggattataggtatgtgttattatgttcggttatttttgtatttttagtagagttggggttttattatgttggttaggttggttttgaatttttgattttaggtgatttatttgttttagttttttaaagtgttaagattataagcgtgagttacgacgtttagtttgtattttatttttaattttaaattttattttgggttaggtgtagtggtttatgtttgtaattttagtatttcgggaggttgaggaggacggattatttgaggttaggagttcgagattagtttggttaatatggtgaaacgttatttttattaaaaatataaaaagattagtcggttatggtggtacgtatttgtaattttagttattcgggaggttgaggtagaagaatcgtttgaatttgggagatggaggttgtagtgagttaagattgtgttattgtattttagtttgggtaataagaacgaaattttattttaaaaaaaaataaaaataaaaaaaataaagtgtataaaggataaaagaaaagatgtttatataatttttaaagaaataagaagatatagtaattataaatatatataaatttaataatatagttttataatttataaagtaataagtgaaagaattatagttagaagttgagttttttaaaaatatatttgatgatttttataaatttttttttaaaaattggtagataaattagattaaaaagaaaaaaaaaaaaaaagtagagtttttgaagggtaaaataataaaattatataagtttaagttaattaataaaatttgaataaataagaaattgatagatttttttatattaaaaatgattaaagagatatgaaaatttattgaaatgtttgattttggattgtaggataagagattgggagtggttggagttataaggttttttattgggaaaattggtaaaatttgaatatgtattgtggattagttaatattatatttaagttaaatttttttaatatgattgtttttttgtgtttatgtaagagaatagttttgtttttaggaaatatattgaaatatttagtaggaaaggggtatgtgtgtatgtaattttagattttttaattattttagagtaaattattttttttttttaatgtttttttataattatttagagtaagtttttaaatggatttaggaatattaatgttttttaggaaaaaaatagagagggaagtagagatagagagaaaaagaaagtaaatatgataaaatgttgtaaattattgaatttggataagtgtacgtaagaattttttgtattatttttttaaaattattttaaaataaaaagtttttaaatgttataagtaatttgtgagttaaaagaaaaatataaagaatatgtagaattaaataaaaattaaaatattgtatattaaaatgtgttagatatgattaaagtagaatttagaaggaaattttttatttttaaatatatttattaggaaatataaaaaaagattaaaattaataagttgagtgtttaatttaaacgttaggtaaagaggaatagaatatatttaaaggaggaaggaaatagtaaagatagttataaaagaaaaagagagataaaaataataaaatagatgaataaaaataaaagttgttttttgaaaagatatttttatttattattttaggaaatagaatgaagaataaaatttgtttaggttattgtttagagaaatttttattataaaaataaataaggaaatataagaaaggtaagttttacgtttatgttttataaaagtaaatataataatttaagtaaaatattaattaaataatattaatagtaaatgtgtaattataggatgaataaatagcgtttattttaggaatgtaaagatgttttatattttaaaaattttttaatataatttattatattaggagattaagaaggaaaatataatgaaatgagttaattttgataaattattttttaaatgtaaaaaattatttatgtttaaaaaataaatttttagaaaattaggaataaaaggaaatttattaatttagtaaaggttgatagtaaagatttttggaaaaattgagtagatatatttttttttatttattttattaagtataattaaaaattttggatattatatatatataaaataaatataagaagattttaaaaggtggaaatgagaaggtagaatagttagaattttaggatttgaggaatgatatattagtgagttttttgggttttttttttgttatatatatgttgggtttggagttgaagaaagtgataatttggaaagattaattggtataaataaataaataaatagaaaaagttttaataatatttataataaaagttttgatattattagttaaaagattaagatagaggtaggtaagtttgttaagttttagaaagtaattgtttagttttaggtaaatattatagtaataattgtgattttattgttatttatattagaaagattaagtgggagatttaaatttttatttttttgaagttgtaataaggtgttttaatattattttgtagtggtatttaagaagattaattaggaagttaagaattttatttttgtaagttagtaatggggttttttttttaagatgttaatggagatgggggcggggggagaatatttgtttagaaataatgaaaatggttaaaagaagttatttaaatagaatggaaatgataaaataggaattttggaatattaaggaagaagatagaataaggtaagtaaatagatgggtaaatataataaattttttttttttttttaagttttttaaagtatgtttgatggttgaagttaaaattataatattgatgtggttttaaatgtatgtagaggaaatatttaagataatcgtatttttagtgaggaggataaagggatgggatataaattaggaaggtaagatttttattatttatttaaaatggtaaatgatgattttagtagattgtgataagttatatgtatatgtaatatttaaagtaattatttaaaagttatgtattaatatatttaaaaatattgtagataaataaaattggcgttttaaaaaatgtttaagtaagttatagaaagttagaaaagagtaaatagagatgaaaattggagagaataaataaaataaatgaaaaataattaagttttttatgttattataggttggattgtgttttatagaattttatgttgaagttttaattattaatgggattatatttggagatagggttttttatagaagtaatttaggttaaatgaatttataagggtagggttatgatttaataggattaatttaataggaagagaaattagggtatgtttttttgtttttttttttttttagttttttttttttttttttttttattttgtttttagaagatggtaattttttttataagttaggaagagtttttattagaagttgattatgttggcgttttgattttagatttttaatttttagaattgtgagagaatatatttttgttgtttaagttatttagttttattttgttatggtattttaagttaatatatatattaataattatattatttttaatataaagaaatgataaatttttgaggtggtagatgttttaattattttgatttggttattgtatattgtatgtttgtaattaatattatatgtattttattaatatatataacggttgtgtatttataataattaaatataaaaattaagaaaaaaaattatattaaatgtaaatgatttaaatattttaattaagaaatttagtttaggttaggtatggtggtttatatttgtaaatttagtattttataaaaaaaaataaataaataaaaaataaaaataaaaataaaaaaaaatttagtttaaatataataatataggttaggtttagtggtttttagtattttgggaggttaagttaggtggataatttgaggtaggttaggagttcgagattagtttggtttatatggtgaaatttcgtttttattaaaatataaaaattagttaggtatggtggtgtgtatttgtggttttagttatttaggaggttgaggtaggagaatcgtttgattttggaagatagaggttgtcgtgagtagagattgtgtcgttgtattttagtttaggtgataagatgagattttgttttaaaaaaaatataaaataaataaaaataataataaaattatataaatataataatataggtaggttaaaagtaaaaggatggaaaaagatataatatgttttttttaattagaggaatataggagtgagtgtattatttttagataaggtaaattttagagttaaaataaaaaaaattattagagaaagataaggacgttttataataatagaagggttagtttattaagaagatattgtagttagaaatgtttatgtttaaaatattagagttgtaaaatatgtgaagtaaaaattgacggaattgaaagaaaaaatagaaaatttataattataattggagatattaatataatttttataattattaataaaattagaaagaaggtagggagtggtggtttaggtttgtaattttagtattttgggaggtcgagggggtggattacgaggttaggagatcgagattattttggttaatacggtgaaatttcgattttattaaaaatataaaaaattagttgggcgtggtggcgggcgtttgtagttttagatattcgggaggttgaggtaggagaatggcgtgaatttggggacggagtttttagtgagttgagattttgttattgtattttagtagtttgggggatagagtaagattttgttttaaaaaaaataaaaataaaaaaataaaaattagaaagaaaattagtaaagatgtagaagagtttaataatattattaattaataggattaaatttatatttataggatattttatttattaatagtagaatatatattggtttttttttgttgtttttttttttcggttttattaggtgtaaggggtatatatgtaggtttgttatatgggtaaattgcgtgttataagggtttggtgtatagataattttaaaggaatttaaattatataaatttttttttgattataatggaattaaattagaaattaataacggaaagatagtagaggaaaaattattagtataatattcgataggtgtttttttaattattattgtttttttattttttatttttaataggttttagtgtttatttttttttatttgtgtttatgtgtatgtaattagttggttttttgtttttgcggtaatttgtttaggattatggtttttagttttatttatgttgttgtaaaggttatgattttattttttatagttgtgtagtattttatggtgtatatgtattatattttttttatttagtgtattgttgatgagtattggataaagaaatttaggtttattttatgtttttgttaacgtgaatagtagtgtgatgaatatgtatgtgtatgtgtttttatgatagaataatttatatttttttaggtatatatttaataatggaattgttgggttgtatgggaattttgttttaagtttttttgggaaatttttagattgttttttatagtgtttgaattaatttatattatttttaatagtgtataagtgtttttttttttttataattttgttagtatttgttgtttttgattttttaataatagttattttgattggggtgagatggtgttttattattgttttgatttgtatttttttaatgattagttatattgagtattttttttatatgtttgttggtcgtatagaatatatatttttttgaagtgtttatgtaatatatattaagttggattatatttagggttataaaataaatattgataaatttaaaagaatataaattatatagaatgtgttttttgattatattggaattaaattagaaataaataatagaaagatgatagaggaaagttaagaaattaagcgaaaatttttaaatattttacgagttaaaaaataaattttaaaggaaatttaaaaatatattgaattgaaagaaaataagaatataatatattaaaaatttttaggagagataatttatagaatgagagaagatatttgtaaattatttttttaataaaggattaataattagaatatataaggagtttagataattttataggaaaaaagagtttaatagtttaaataaaaaatgagttgatttgaatagatattttttaaaagaagatatataaatggtaattaggtttatgaaaggtgtttaatattatgaattattagagaaatgtaaattagaagtttaatgagatattattttattttagttaaaatagtttgtatgtaggttggatacggtggtttatatttgtaattttagtattgagggaggtcgaggcgggtagattatttgaggttaggagtttaagattagtttggttaatatggtgaaattttgtttttattaaaaatataaaaattagttgggtatggtgggttatgtttgtagttttaattatttgggaggttgaggtagaagaatcgtttgaatttgggagatggaggttgtagtgagtagagattgggttattgtattttagtttgggtaattgagtaagattttattttaaaaaaaaatggtttgtatttaaaagataggtaataataagtattggtgagtatgtggagaaggttttgtatattgttggtaggaatataaattagtataattattatggagaatagtttggaagtttttttaaaaaaattaaaattgagttattatatgatttagtaattttattgttgggaatatattcgaaagaaagaaaattagtattttaaagagatatttgtatttttatgttaattgtagtattgtttataatagttaagatttcggagtaatttaagtgtttatcgatagatgaatggataaagaaaatgtggtatatatatataatggagtattatttagttagaaaaaagaatgatatttagttatttgtaataatatagatggaattggagattattatgttaagtgaaataagttaggtatagaaagataaatatgatatgtttttatttatttgtgggatttaaaaattaaaataattgaattaatggatatagtgagtagaaggatggttattagagtttgagaaaagtagtggatagttgagcggggaggtggggatggttaatgggtataaaaaaagtagaaagaatgaatatgatttattatttgatagtataatagagtgattatagttaaaaataatttaattgtatatttttaagttatttaaagaatgtaattgaattgtttgtaatttaaaggataaatgtttgagggaatggttattttattttttatgatttggttattttatattttaggcgtgtattaaaatattttatgtattttataaatatatatatttattatgaatttacgaaatatttttaaaataataaaaaaaattataggatatagttaaattagtgttgaaagggaaatttatagtattaaatgtatatattaaaaagaagaaaaattgggtgttatttgggaggttgaggtaggaaaggattatttgagtttagtagttcgaggttagtttgggtaatataaggagattttgtttttttaaaaaaaaaaaaaagtatataaattaataatttaaatttttattttaagagtttagaaaaagaagattaaaatatatttaaagaagaaaggaaggtcgagtattgtggtttacgtttgtaattttaatagtttgggaggttaaggtaggtggattatttgagtttaggagttagagattagtttgtttaatatggtgaatttttgtttttattaaaattataaaaaattagttaaatgtggtggtaggcgtttgtagttttagttatttggaaggttgaggtaggagaattatttgagtttaggaggcggaggttgtagtgaggtgagattgtattattgtattttagtttgggttatagagtgagatataaaaagttgtttttttgaaaagattagttaattgatgaatttttagtagattatattgataaagaagaaagaaagaatatagaaatgtttatagggaatatttttatatattttgtagatatcggaaaaatataaatggtgttggaataattgaatatttaagggttataggaggagagaaagataataaggaggaagagaaggaggagtagtagtttaatttaagatttatattttttgtaaaaattgatttaatatggattataaatttttatgtaaaatgtaaaattataaaatttttagaataagataggggaaaattttttgaatttagatttgggtaataagtttttagatttgatattaaaaatatgatttgtaaaatgaaaaaatggatatattagatttgattaaaattaaaaattgttgttttgtgaaagatttgtaaaggaatgaaaaggtaagttatataatggaagaaaatatttgtaaattatgtatttaaaaaaggattagtatttagaatatataataatttattaaaatttaggttaggttttttggtttatgtttgtaattttagtattttgggaggttgaggcgagtggatgatttgaggttaggagtttgagattagtttagttaatatggtgaaattttgtttttattaaaaatattaaaaattagttgggcgttgtggtatacgtttgtaattttaggaggtagaggttggggtgagtcgaggttatgttattgtattttagtttgagtgatagagtaagattttattttagaaaaaaaaagaaaaaaaattaatagtttgaaaaaaattaattagaaaatgggaaaaatttatgaagagatattttattaaaaggatatatagatggtaaataagtatatgaaaagatgttcgatattattagttattaaggaaacgtaaattaaaattataataagattttattatatatatattagaatggttgaaataaaaaatagtgataataagttaggcgtagtggtttatgtttgtaattttagaattttgggaggttgaggtaggcggattatgaggataggagattgagattattttggttaatatggtgaaattttatttttattaaaaatataaaaaattagtcgggcgtggtggcgggcgtttatagttttagttatttgggaggttgaggtaggagaatggcgcgaattcgggaggtggagtttgtagtgagttaagatcgtattattgtattttagtttgggtaatagtgtaagattttattttaaaaaaaataaaaaaaatagtgataatattaaatgtttgtgaggatgtagtaaaataattattcgtatattgttggtgtaattattttggaaaatattttgatagtttatttaaaaaattaaaaatgtaattattatataatttagtaggtatatttttgggtatttgttttagagatattaagatttatgtttatataaaaatttatatttatattagttaaatttggaaataatttagatgtgatggatagatggttaaattaattgtgttatatttatattatataatataattaggtaataataaattattgatatatgtaataattttgtatgatttttagagaaatatattgagagaaaaaaaagttaattttaaaagtgtatatattatatgtttttatttattaattatttgttttaaaatgataaaaaaaaatttgttttgaagtgataaagttatagaaatggataagagattagtgattgttagatattaaggagggtatgggatggtagggaagtgggtgtgtttagaaaagggtaaggtgaagaatttttgtgattatagaagtgttttgtattgtggttgtatttatgtattttaattgtgatattgtattatagttttgtaaaatgttattattaagggaaattgggtaaaggatatataggattgtttttattattttttattattgtatgtgaatttataatatatagtaaaattatatttaatgagaatatttaggtttattttttttaagagtaatgtttattattattttattgtttgatatagtattgaagattttagttaagtaatatgaaaaataaaatattaaggattaagagggaaaatataaaataatgttcgtagatgatattattatttatttggaaaaagagagagatagagagaatattaataataataatgataataataataataaaaattttattaaaattaataagaggatcgagtaaggttgttttatataagattaatttataaaaattattaatttttaatatttgaaaattatatattagtatttgaatattatatatttaataaagggttaatatttagaatatgtaaagaatttataaaatttaataataattgtttatataaatagttaaaaagggggtaaataaaatttttaaatagataattttttttcgagaatgatatataagtggtaaatatatatatgaaaagatgtttagtattatttattattagagaagtgtaaattaaaattatagtattatttaatttttattagtatggttattataaaaatgaaaggaaaaaggaaagaagggagggaatgaaggagggagtaaatgaaggaggaaaggaaagaaggaaggaaggaaggaagggagagagggagggaagaaataagtgttggtgaggatgtagagatattagaatttttatatgtaatgttcgtgggattgtaaaatgtgtaattgttatgggaaatagtacggtagttttttaaaaaattagtagtaaaattattatatgatttaagagtttatttttgggtataaatgtaaaagaattgaaagtagggatttaagtagatatttttttttatatttatagtagtattattttcgatagttaagaggtggaagtaataaagatgattatagatagatgaatgggtaaataaaatatggtatatatatatagtagtttattatttagtttaaaaaggaagaaagtatttttatatgttgtaataagtatgaattttaaggatattaagttaagtgaaataagttaatcgttaaaagataaaaattttatgattgtatttgtatagggtatttgaagtagttagatttatagaaatagaatgtagagtgatagtagttaggggttagaggaagagagaaatgaggagttgttgtttaatgggtgtagagttttggttttgtaaggtgaaaaggagttttggagattggttgtataaaaatgtgaatatatttaatattgttgagttgtatattttaaagtggttaagacggtaaatgttatttttttaattataattttttaaattagatatatttttttatattagaaattattgatttaaaagtagaattgtaataagatattaattataatagtagtaaaagttataatatgtttaagaattaattgagtatatttaggattattatgaaaaagtaaagtttaaaaattataataaagagtaaataaaatgattttaataaatgagaaaatattttgtttttgtatggtatgatttagtaataaaaataagttagttaattttaaatttttataaatttagtataattataattaaaatttaagtggggaagatagaattagaagtgagtgtttttttaaattttttagtaggaaattataaatttagtttttgttgttattatgcgtttgttattgtttaaggttaaaagaagtttagattttgtatttttttttttattttataatattgacgttttttttttttgttgtgaatgtattttttgttttttatttgtttttttggatttatttttaatatttttgtatttggggtttgttttaggtgttgatttgtatgatattgaatggtttttatgttttttggtttttttttgtttttagtattagtttaagagtagagggaagaggggagtgaggttagtgtttttaattttttggttttttttttataaggttattttaagttgttgtgttttttgattgaagggtattgtttttggtaaggtggtgattgtatagggtttgttgtttttttgagttttgataattttttttgttttcggtttttttggattttggggtagtaatagttattttttatttagttttttgtaaatattttgttaataaataaattttttttgaaatgttttatttcgagtatgttatttgttttttgttgagattttgatataataaaagttatttttttattttttgttttagattagtacggttaggggttttttggaagttttatatgaaatggaagaggaagggtttggagaaataaggagttttttatttgggagtagtttttataggtttggggtttttttattttttgaaatttttggagattggtttggttaagtagtggtaggaagtattacggagaaattttttatgttttgttttaaggtagttggagggtttttgggaatgatagatatttaagttaaaaaaaaaaaaggatttgaggatggggttgaattttattttcgttttttatttgatttgtttaattttattttggaaagagaaaaatttgagaaaatggtttaaagataatttttataaatagatattgggattaaatgttaattttgtttgttttttttatatgtatgtgttcgtgggtagggaggtaaagagaatttggaatttaggaatatgtttttttttagggaaaaaaaaaatgttaaggatattatttttcgtggtgtatttgagatttatttttattgtttttaatggttaaaagaagaagtttaaatgtggggttaacgcgtttttttaaaatattgttatttgttttaagtgttgaaggaattttttgtattgtgtgtgtttttgttaatataggtttagtttttttatgggaggggaggtggattagatgatttttaaaattaattttagttttaagtttagtttttaaaataataagatattgaagggcgaaaataattttttgtgtagtttggattatgtataattcgaaagtttagtttttttttttttttttcgtttttttttttttttttttttatgttttttttttttttttttttattttatttttttttttttatttttttgtttttttttttttatttttttttattttttttttttttttttttttttttttttatatgtgtttaagtgtatatatatatatatatatatacgtattttttttttggtaatttattatgtttatattttattttttttatgtagtatttatttttttttttttatttttttataattggtgtattattattttttttttattttttttttaagtattatttatttttttgtgtaagaatttttttttttatttatagtattttgattttttggattttagtagatttatatatatttttttttattttttatttggaaggggatagttttttttataaaataaaaaatttataaagttagggtagagaaaagtttgtattggaaatttttagaaaaggaattggaagtcgttttattagttaattttttattttttttttttgggattttgttattttgatttttattgttgtgattagaattagattttttagatttgtagttttttttttaaaattgtttagataggtttagtgcggtggtttacgtttgtaattttagtattttgggaggttgaggtaggtggattatttgaggttaggagatcgagattagtttgattaatatggtgaaattttatttttattaagaaaatataaaattagttaggtatggtggtgtacgtttgtaattttagttatttgggaggttgaggtaggagaatcgtttgaatatgggaggtagaagttgtaataagtcgagattacgttattgtattttagtttgggtaataagagtaaaattttgtttcgaaaaaaaataaataaataaaataaaaataataaataaaattgtttagatatagataaggtttaaagttttttatttttagattaaattagaattttaaaaggaatttgttttgttaaataaataaaaataaaaataaaaatagtgaatagaaaaaatgaaaatgaaatataaaaatggtaaaatgtagagattaagttttttttattgattttttttgttaattttttttagaagagatgttttaattttaaggatgtttttgaagaaattatggaggtgttttaaattaatttattttttggttttttttttttatttatattttagtatttagttttaattttaaaaataattttatattttaggtttttgtgtttagtaggtgtcgtttttcgtgggataataaattattagttagtatttttttttttttagggtggagtttatttttttaaagggttttttttggttttggggtagaagggaatggaacggtggttttgaagagatgtgtgtttattagtatgagggtttttagaataaagtaatttgttatttttagtttaggtagataaatattttatagaaatttgttttttgattttggataagttatttaaatgtttttgagttttatattttttgtttgtaatatagagggaaataatttgttttttgtgtggttattgtgagaagagaatgagttataaatataaaggtttgagattagtgtttaagatataataattatttaagttatgtttttttttgtatttagggtatggaagaaataattgtttagaatttaatttggagttaagttttgttttttgaattttgaggggtatgaggggtttgttttacggttgtgatgaggattaaagtatttggtataatgtttggttagaaagttgaataatcgaatatagttaacgttattattgtaggttggttatgtgtttggcggtgtttttagttatttataagtatgaatttatttaatttttataagattttgtatgaggtgagtaagttgttaatttttttttttgtttatattttgtgattttaatttattatagttgaatttttttttatgaattataaattagaaaacggttttaaattttgttatgtttaagtgggaaaatggaagaaggtattgattttttttttatttaagtagaagagaattaattttagtttttgttttgtttatattttttttttagggttttaggaagaagatatggaaaaataatatttttattaaagtttatttttttgaaataattattagttgttgttttttatggtatattgagagttttaggagggtttttaatttttttttttagattatatttattttagaaatatagttttggataataatttggttatagtatagttttaggaatgaggttttttaagttgttaagttttatataggggagattgggaaatttaaagaattggatggagaaattataggatttaagataatgttagggggttgaagatgttggagaggtatggtagtattattgagtttgaattttttttttatttggagtggaagttgtaggattttgtttttaggaaatgtgttattttatagaataaataaaagggagataatgaggttttaatttaatttgtttttatcgtttgttattgtaattattttatgttttaatatagtgatattgaaaattttagggtattaataattaatataaaggaagtatttttagttttttttttatagatattttatttggtagaagaggaggatgtttttttttgtttttaattttagtaatggtagtttaaattatgtttttgtttagatttttatggaagtttatttatataataattaagattagttgaatttaatattgatttttttaattcgtatttttattaaagggtaagtagggaaatagattaatagagatgttattttttgaataattggatttaggaagaggagtgtaatttaagagaggaagatatttgattatattagtttttgtggatgaaaatatttagtagtatttatagtaaatgtagtaggaaggagagagttaattataaatagaaagtaagtagagagtgggattaagagtggggatgggagtttagcgagttatttattagagtggttagtttttcgttagttgattatattaagagagaagatgatgaggtttaggtttagagttattgtagatatagaaatttttagggtttgtatgggggatagtttaggtgttgtaaaaaatagaaatttatttgatttagtttttgttgtttatttttagggtaattttatttattgtagttattttttagtgggttaaaaggttttttattttagttttaagggtttagtttatattatttatttttaagaaaatgattttttttaaattaaattttcgttttatggatttttatttttagagtaagtttggggaatttatttttttagaattagtattttggtttttaggttttttttaatatagtggggttttttaaggtatttttttttttttttttattttaaagttatttttattaggataaagggttttttattgttttttttattgtttttacggtaataatgtttgtttttttattttttttaattgagtagttttttattatattgttttattatatgttttaatttttagtggatttattttgtgagttattttattatttgtgtattttttatatttagattttttatgtgtttttttagagtttgtttttattttattttatagtttttgtatttttttgggtcggttttgttttgaattatgttttatttagattttttttttatgataaaatgaatattttatttttaaagggaggtttttgtgtacgttgtgaggagacgttttttaggaaagtttaagtgagtatgtgatttttatttttttttttgttttttattttttttttaattgtttagtaagaaataatattttttataaggggaaatttggttatagtagttgatttgagattttgttttttggttttttgtagatatttttttttttttttattttttttttttttttttttaagagtttttaaagttgtgtgtaattttttacgatatttttaattattttcgatattgagtttaaatagtgtttgaattgtaagtaattttttatttattggtttttgagtatgtatgttaaatggtttgttagtcgtggttttattattttcgtatgtttggtagagtaggttaaatgtagtattgttttatattaagaaaagttttttttttttaatttttattatttttttagtttttatttgtttttggtattagaatagttgaaatttaaggaggttagaatagtgtattataatttggggttttgaaaatatgattgttaaatttatatttttattttaaagtaagtacgttttttttttatttttaaatatagacgtagtaatattaattatattattagagtagtaatagtatagattaaatattaaattggtgtaaaagtaattgcggtttttgttattgaaagtaatggtaaaaattgtaattatttttgtattaatttaaatatttttatttttttattttatttttttattttggttttaagtttttcgtaagtttttttagatttagtttttatttttagtatttcgttgtttattatgtattatgtatcgatttatattttattttttttgttttgattttaattttatttatttgttatatatttattttagtttcgaaggatgggtttaggagttttaatgtgttttattatataggtgtaagtgttttcgtaagagggggttaaggttaaatgggagagggtttggtatgtttagtttttattgggttgggtagttttgtgcgtattgttgtgaggtatgataagtttttcgttttttttttacgtgatagttatttttgttggatagaagttttatatatagtaggttagtattataggttttttcgtgttaaaaggagtggttttggttatttgtatagatggtggttttgtataggagaaaaaaatatgtttaggaaggagggtgatattttggttgtttttttaatttggttttttttttatcgtaatttttcgtagattttgtaatttattttttattttagttttttttgttatgttgttttttgaaggggaatcgttagaatgtatttttgtattattttttttttttttttatttttttattgtttttttttttttttttttttttagaattatgtttgattataattagtaaaagttagatttgaattgtaagttgttttagaagttgttgtatttattttaagtatataaattggaaagtatttgaaataaggaagttaagagtaatttagagttgtatattgggtttttttaaggtggaaaaggaatttttttttaaattttgtttaatacgtttttttgttagttaaagttttttttttttatatagtttaaggaaataagtttaatttaggatttatttttaaatttggaatgaatgtagttaaattaaagagattgttaatattgttattttttattaatttatttttttaggtgatttttttgtttgtttttattttgatattttttaaatataattttaaataaaaatttaaggaattatgttaaaatgtagattttttaggttgtatttttagatatttttttttaatagatttggagtggtattaaggggtttgtatttttaataagtattttttttaggtaattttgagaaaggtggtttagaaattatttttgagatatattgttttgtattgtggagatttttaagtttatttttataaattttaagttattgttaatgtaagagtttaagggtgagaaaaagtatgtgttagaattttttgggattttaaatatttttatgtttgggtttatattagatttggaatattaaaatttgggataataaggtaagaatattttgggtatgtattttgagatgttttagtttttgtataagttttttatatggtatttcgcggtttaagttttatttttttttttttatttttgttttatttacgttagttattttgttttttttgaggtttaatttttcgtttttttatattttagatttatatatttttttttatttgttgtttaaattttaaatttttgggttattgtgggattttttttggtttgtttttttaattgtattttttggtagtttttttgtatttttttttttttacgtgttttgttggttagtgatttttagaagggttgggtgtgtgtggtataattttgaagtttattgcgtaagcgttgtattagggtgtttttttggttgaggtgttgtgagaggatattcgttaagttatttagtattttaaattcgtaaggggttattttatttttttttggattttagtaggttagtagatttttgttgaaggagatgtagtatgtgaaattttttggagttttagtattatttaatagataggtgttttttatatgggttacgaagttatttagaggagttagggaagggagaataggttaatgttttttattggtttggtaataaataaataaatatataaataataaatatatataaataataaatatataaaatatatagacgtatatttaggagttttgtatagagttttgtttttgattttggtttttgatatagagtgtttaatcgtttagaattttttagataataggagtgttttttgttttaatgaggtatttttggtgggtttttgtaggaggggttggttattagaaagattaagttatgattagaagtttggaatttttagttttattttttatattttttgaaggggaaggggttggagattgagttaataattagttatgtttatatgatgaagtttttataaaaatttcggaattatggagtttagagaattttttagttggtaaatatatttatatgttaggaggtgaagtattttaattttgtggggatagagtttttgtgattgggatttttttagatttggtatttttttatttggatgtttttttgtatgttttaaaatattttttgttaaaggatgtaaaattatgatttagtgttttatattattgtgggatgattgttattaataataatattttatattattttaaatcgttagaagaaggatatggaatgtttttaatataaagaaatgataaatgagatgatgatttgatttgattattgtatattatatgtattaaaatattattatttattttatgaatatttataattattattattaattaaaatattttttgtaaaaaatttataataataagtaaattttttttgagttttataagttattttagtaaattattaattttaaggagggggttatgggaatttttgatttgtaggtaagttggatagaagatgtgggtaatttgggaatttattatttgtgattggtgtttgaaatggaggtagttttatgggattgagtttttaatttttggtgtttatgttaattttagttaatgttataatggaattgaattataggatatttagttaatataggagaattggttggtatgagtaaaaaaaaaaaaaaaattttatatagttggttaaagaagtgttgagtgtgagtatatagaagaaaaaaagttgattttttttatatttagtttagaatttaagttttggtgatatttagttagtttggtatagattttttgtttagggaatatttattgattaagtttatatattgaagtttttgaaagtttgatttgagggagttagtagaagtagtagataagtttttagatttagttttttttttatgtaagattaagtatagggataggagtagtttttcgagattatttgtatgtttaaatatgataatttgtttagaatatagatttttagtaaggtaaattattgagagagaaaaagggttaagagaaagagttagttttgtattgtgttggaaatattaaatatttatttcgtatatatttatgaagtatttgttgtatgtaaggtattgtgttaggagttgaggaggtagtaataaataagatgaatattgtttttgtttatattttagtagggaatatatattgtatagataattatatagattaattatattaaaattgttataaagtataaagtgttataggaatgtatattagggagataaattatttggggtgttaaatgtaattataaaacggaatatttttattttgaaataggagtaggggaagggagagtttttagaagaagtgtttttatttgtttttgtgtagtttaggttgagttttagtagtagcggtaggaatgtgattatgttttgttttgtaaagatgtcgggagtttagttttttggattagtttttttagggttcgtgggttttcgtttgttttagaagttttagtttgggtagatgatttttagatattgagtagaatattatattgttcgggttttttgattttttaaatgagtgatgtggggatatttagtttttagatattaaatttgttttttttagtttacgggagtttagtgttttaaatagggatagattggttaggtaggtagggataaatgtagagataaattattgagtgttttagtttagtattattagttattaggtaaacgttattttgttttagttttagataataggtttttttgttttttttaattttttttttgtagaataattagtagattttcgtagattattggagagaataatcgtaatatttttaggatgtatgtagtttgggttgtttattggtttaattttttttttttaatgtttttttaaaagattaggattagataattttttttattttttatagggaggttatttaagaagataattataaaaatttttgtttgttttgagatgagaggatttagagtttttttggggtaggtggtagaggtagggttgttgagaaggaagaaggtatagatagagtatagaattgtttggttttaaagtaagattgtagaataagggaagtagcgttattatggagattaggaataggggtttggaaaatttttttatgggtttttattgttgtttttgttttagttagttaagttttattttttttttagttataatagttgtttttcggagttagtaaattatatttttttatattttgagtaattttacggggtagatcgtaggttaatattttttagattttttgaaaaatagttggtgacgggttagtgtttagagtttatttgtttttcgttaaattttaaatatttttgtgtgttttttttattatattttgttttttgggggtaggtttttgtattatgaagttattaggaaaatgagataaagtttttttatttttttttttttgaaaagatagattttgttttttattttttgagaatattaagtaagattttattttttatttattttaaattattttaatttttgttttaggtttaagggtatatatgtaggtttgttatataggtaaattgtgtgttatcgggatttggcgtaaaaatttattttattatttaggtaataagtatagtatttgataggtagtgttttgatttttttttttttttattttttatttttaagtagggtttagtgtttattatttttttttgtgtttatgtgttttatgttagttttattataaagtgagatatgtagtatttattttttgtttttgtgtaggtttgtttaggataatagtttttagttttatgatgttgtaaaagacgtgagtacgatttttttagttgtggagtattttatggtgtatatgtattatattttttttatatagtttattgttggtgggtatttaggttgattttatgtttttgttattatgaatattgttgtagtgagtatttatgtgtatatgtttttatggtagaataatgtatatttttttgggtatatgtttaataatgggatttttgggacgaatggtagttttgttttaaggtttttgagaaattgttaaattgttttttttaatggttgaattaatttatgtttttattagtagtgtataagtttttcgttttttttgtaatttttttaatatttgttattttttgattttttaataatagttattttgattggtgtgagacggtattttattatgattttgatttgtatttttttaattattagtaatgttgaatattgttttatatgttttttggttacgtgtgtgttttgaaaaggtagattttatgtatttgcgtatttattttttttataggttttttttttgaaagttttattttgtcgtttaggttggagtatagtgggataatttcggtttattgtaattttcgttttttgggtttaaatgatttttatgttttagttatttgagtagttggggttatagttatgtgttattatttttggttagtttttgttttttttttttttttggtagagatagggttttattatgttggttaggttgtttttgaatttttgattttaagtgatttatttattttagttttttaaagtgttaggattataggtatgagttatcgtgtttggtttgaaaaagtagattttaaacggtaatttatttttttattttattgtgaattatatagttgatggattttttattattaatttgaaattttaaattggtttttttttgttttttagtaggttttagggttgtttttttatattttagtttttgagaatttttggattttattaaatagtgagttaaataaaataggattgtggaaggggttttttgatattatatttatttgtttttttttaaagtttttgattttaggaaaatttaatatttatgaagaaaatggggataaaaaatgtatataaagattattattaaaaacgaaagattcgttgtgtaattaattgagattaattgaagttttgttatagtttttagttattgtttttatttattttgtttatatattttaattttgttaacgaattgttaagtgtgttggaatgggtagaatatggggtggggagtgtataatttgtagagtttttatagatatagtgttaggtaggttttttttataatattttattttattttaaaagatttgttggtcgggtatggtggtttacgtttgtaattttagtattttgggaggttgaggaaggtatattatttgaggttaggagtttgagattagtttggtaaatatggtgaaatttcgtttttataaaaaatataaaaattagttgggtgtggtggcgcgtgtttgtaattttagttattttggaggttgaggtaggagaatcgattgaatttgggaggtggaggttgtagtgagtcgagatcgtgttattgtattttagtttgggtgatagaatgagattgttttaaaaaaaaaaaaaaaaaaaaaaaatttgttaattgtttttattttttaggttggaaaataggtttaaagatttatatttaaggtttaaaggttgtaatttttttttttatatagttgttatatatgtacgtgtgtatatatatatatatatatatatttttttgagtatgtttatatatttattatattttggaattgggatggtttaaataaagggagttagtgaggttttcgttgagaaagagagaaagagaagagttataatttataatttaatttatttaagttttattttttttgtttttagagttttttttgttttgagaattatcgttttttttatttttttttttgataagttttaaaattgaatttttttttatatttttttaatatattttttttttatatttttttttattttgtttaggtaagttgttagtttaattttataggaattaagttttgggattttttttaatgtttataaagtttagttttggtaagggagtattggttgtgtggttttgtgttagtattgaatatggttttagttagtaatagtggggttgaatgtagtttttttttatgtttagatttttgtttcggtagttaaaggagatgtgaaattttttgtgaggttataataggaaatggtaggagaggattttatttttttattaatttaaatattgagggagttttttagaataaagaaggatagaaaatttagatatttgtgtttagtagtgttttttttttttttttttttttaatttttttatttttatagatatagttttgtttttttatttttagttaatttaaaataatattttagttgttttgtttattgttatttatttgttaattattgatatagtatcgggatcgaagaggtatggagttttaattaggtttttatatgttgttttttttttattgtttttatataattatttaaagagtgagttttttttttttttattgtttttgtttttagtttgattattatatgtttgtagtaaattagttttagggtttgtgtgtaaagtattattgggaaaatatagagtgagaagatatggattttgtttttatatcgttttgtttgtacgttaattggggagtgagaataaatattttaaatagtttatattaaagtaagtaagtaataaggttagtggttttaaaagagaagagagaaattattatggatatggtagatagggagtatttttagtcgagagggtttggaatgagttttgaatattgggttggatttgtgttggagaggaggaaggtagttggtattgtaggtttggtgtatagttttataagtttgataatgttgtgaggtgttattagggaggaggtgttttacgagagtttgggttagttaaaataaagataagttataataacgttattggtattgtacgttggaggaagttataaatgtgattttttgtttttttttgagagtatggttataataataaattttttttaggtattttttaaagttgttttatgttagttcgtaggtttttggggtagacggttttaattgaagtttttattttataaatataaaattgtttaattagttaattacgttttatagtataagattatattcgtgattttagtgtttttttaaaattatatatatttatattttgttaagattatattatttgtttaatttgtttaatttttattttatttttgttatttattttttattttattttcgtttatatatatatttttttattttgttaggatttattgttttagattttgatttttggattatagtttttgtagttagtttattatttttttaatttatagttaaattatttgaattattagggatagtttatttgatttgttataattatttttttttttttaattttattttttgttattataattattgaagaatgttatttttattttatttacgagaaaatggaggtagagggaggttaagtggttgtttagatttatttagatattaagtaataaaattattatttgaatttaggatttattattttaaattttgtattgttaataattaattggaaaataattgaaaattgtttattatttataataataataaaaattatagtatatttatgaattaatatattaaatataagaattttaagaaaaaagaaaattttattgaagtgtataaagatttgagaggtgtagagatatattatatttatggataggttatgttaatataatgataatttttttttatatttttaatttaaatgttattttaaattaaagtaatagtaggttttaggagaatttaataattgattatgaatgtataaggaaataaagtttaagagtattttaggatattttgataaagaaaaggaaaataaattttttgggaaggtggtgaaggaatggagatttgttttttttaatagtaatatatattaaaaagttaaaataattaaataatatgatattgattagtaatgagagaaaagtaaattaaaataataaaatattattttatatttattatgttgttaatatttgaaagttaaataattataagtattagtgagtataaagggaaatgtgaattattttgttttgttgatgggagtgtaaattgtttatgatttttgaattatagaaattataaattagttgggcgaaaaaattaatataggaaataaagcggtatattttaatttttaggttgagtgttttaagttttggaagattttaataaagagaaattaggggtaggtttatggaataagttgaattggagttggatttatggagtgggttaagataggaataagatgagtagaatagagaaagttttcgtatgagaggaaagagtttgggtaaatgttttaaattaaaattagatataatattttaaggaagagtgaggaaaaaagatttaaataagaatagtatttttgttgggaatagtgcgtaatatagtatattagaaaaggggtattagattagagaggatatttgagtgtttttagagtatttaagtaatagtattatagaaggttttattagagagtatttaatttaagtttattattttatagatgaagattttgaggtttagagaggggaagtgatttgtttaaagttatatagtataataaagtatttttaagttttgtttgataggaaatatttagataagttggaaaatagagagatagagaaattaggaagaattagaaagtattatatttagaattattaatatgagaataaaaagaaaaatatttaaaatggagaaaatataatatttgaagttagtattgaggtatatttttagaaaagagaaagaagtttacgaggtaattaagtttttttttgaagattaagattaataatgataagggttagggttatttagtatattttttatgtgttaaatattattttaagtattttgtaggtattaatttatttaagttttatagtatgaggatatgttgttttattttttatattaatttttttatttaattagtttataatttttgtaattcgggtattataaatagtttatatttttattaatagattaagatattatagtttatatttttttttattttcgttaatatttatttgatttttaaatgttggtaatatggtgggtgtagagtggtaagggggatattattgttattattatttttttatagaaaatgatattaaagtataagttaagtaatttgtttaagggtttatagttaaacgttgatagttacgattgaatttttagtagttaggttttagagtttatgttttttaatcggtatatatgatgttgttagaaatgagatggtttagagatagtgtaattttttttagggagaatttaatatttttttttagattagattttagtataatgttaagaatagaaatttttttattaaataattgtttttttaattttattgttattttgttatttaaagtaatttttagattttaaggaatgtaagaaagaaagtatatgtaaagtaatttattattagtggttatgtgttgttatttttcgttatttttttaggatagtatttgtgtagttttttttggatagtttatttaggttaaggaatagattgttaggaaagatatgtgaattttttgtttttttaggttgtttttattttatgttaggggttttatgatattgtttttttagaattgatataattgattggtatagtatttgggagtttattttttttatttttgagtttttgttttttagttacggtgagggttgaagggagttatatgttttttagggtagtttatacgagatataaatatttttataaatagtaaaatatataatatatatatatacgtataaaatatataagtagtttttttaattattttgtaagtagattattagaaaataattttgttttcgttttttatatattttgtataaatcgatagatggaaaaatattatgtatcgttaagattagggaataagagtttagttggtaaattaggggttttttttatttttttttttaacgaggttaagttgtgtttaggttaaggtatgttgaatttgaaacgataatttatttaagttgagatatttagaaataaatattatgagttaagaaagaagttatattgatataaagaaatgagatttattgttttgtggggggaagggatgtggttgtgataggtaggttattttgggatttttgggatgtaagtttagggatagtagagtttttaggtgggaaatttatatatatattttagggatgttttagagattttttttattttaagaggagattttgggtaggatgtgagaaatttgagtattttttgtttggatggtcgaagttgttggtattaaattttggtttggaagaattagtttgggggagagatagggatggaggaaaggtattaggggatttatttttttttttttttttttttttttttttttttataaaggttttgttcgttttgtttgtattatattttgtagaagttgatttttttttgtttttaaattatttttaagtattttttttatagtattttatgatttttttttttatttaaagtaatttttgtgatttataattgtgtgtgtgtaattgggtttttaattgggaagatgtgtttttatggtgttggatataggtttttatatttaagggtttgaggatcgttatatgtttttttatgttataaaataattttgatatatgtacgtatgtattattgtatttggtttttataggtttattcgttttttttagatgatatattatttgagtaaggttttcggaagtagatgatgagaataatgtttacgatgatgtttagtatatttaggttaaaggttacgttatatagtatattttttagtagatttgagggtagtgcgtttcggggtattggaggaaatgagtggtttagtttggggatttagttagggagttttttatttagggaaatgacgtgggtgtttgggatgatatgggagattgggatgggtttagggtaggaatggattaaataaggtattagtggagaaagaagtttttttttatggatttatttttttttgtttttaaaaggattagaattttagggagaaagttttattttaataggtaattgttgtgtagcggttaatttcgtgagttataatgtaggagaaaatgttagaaggttttggtgtgaagtttaagtaagaaaaggtttggaagttgagtttatcgatagttgagataaaagtaggtttaaatttttttatagggacggaatgatgttgttagtttattgttagtatgggtgggaagagattattgataaaatagattaaagtgttgggtttgttaaattttaggggttttagcgtgaatattttagcgataggaaattttggtggggggattgaagtgtagggggaaaaagagattagtttagatggtatttttgtgtttggaggggttatggtatatggaggggagggtagagaagaatatagtgggttaggttttgggagatagagatgagcgaggagttgggttttgaagggaggtttttttttaggtaaggattgtagttagacgtagaagtagagttagatttaggttattttggatttttttattatgattttttttagtattttttgtttagagtttatattgatgtttaattatgtattgtttttttattaagatatagttacgttattagatatttttattttttttatttattttgttgggtatagtagtataagtgttaatatttagtaggtattagttggtatttgttgaatttattatatttaatatatagttttgaatgtttattatatgttaggtatttcggtttattaaaagaatatagggtgtagattaaggttggtggaaaaattaaggtgatgaagagaattagaaagtatttgagatggggagttggtattaaggggaattatttagtgtatagattaatgaggttaatgtagtttttttttttttattttttagaaaatttttgatttttggatatcgggatttttttattaagttttggttttatttgttggattatttattcgtagaattttttgttaaataaaatggtaggagtatttttttgtttttgagtttagttagtaaattcgggtaggcgaggtattcgagtgttttgggaaaagtcgaagaagaaaagttggttttcgtcgtaggttttagagagttttatattgggatttttattttggtagtatattgtgtgtaggaatgtgtggttttgtaggttatttggttatattggagtaggagttgtaaaggatatagggtgaggtttagggaggtgggagtttttttttttaatttaaaaaatagtaaggtggggttaggcgtagtggtttatgtttgtaattttagtattttgggaggttaaggtgggtggattatgaggttaggagtttgagattagtttggttagtatggtgaaattttatttttattaaaaatataaaaaagtagttgggtatgttggtatgcgtttgtagttattcgggaggttgagggaggagaattgtttgaattagggaggtagaggttgtcgggagttaagattaagttattgtattttagtttgggtgatagagtgagattttgttttaaaataaaataataaaaataagtaaggtttgtttaaggagcgtgggttgaggtgagatttttttttgtgtttgttatttagatttttttttttaaagggggtgaagaataaattatggtatttttttaagttttttttgtttataaaaaggttagttggtaaaagtaaagagttttattttttaaagtgatagatttaggttaggtatggtggtttatgtttgtaattttagtattttgggaggttgaggtaggtagattgtttgagtttaggagtttaagattaatttgggtaatatagcgagatcgtttttataaaaaatataaaaatttagttaggtgtggtggtaaatatttgtggttttagttattttggaggttgaggtaggaggattgtttgtgtttaggaagttggggttgtagtgagttatgattgtgttattggattttagtttaggtgatagaatgagttcgttttaaaaaatatatatataaaggtcgggcgcggtggtttaagtttgtaattttagtattttgggaggttaaggcgggtggattatttgaggttaggagtttgagattagtttggtaaatataatgaaattttatttttattaaaaatataaaaattagttgggtgtggtggtatgcgtttgtaattttagttatttgggaggttgaggtaggagagttttttgaattttagaggtaggggttgtagggagtcgagattacgttattgtattttagtttgggtgatagagcgagatgtcgtgttaaaaaaaataaattaaattaaataaaaaatttaaaaatgtatatatataaaataaagtgatagatttagagttattgtttattgtgtgtttgggggttgtataaagatatttagttaaagaagtaagtgaaagtttgtattttgtttattatgttatatattttggtatagggttgtatttttttaaaggggatttttttgtttaatttatattaggttattgtattgattagagaaggttatggatgggttttttatttttagaagggaaagaggaggaatggttatagtttttttaagttatagatgggattgttttttattatttttagatataaatggtaaattggaaaatttgtatttagatatttttttagttattttattggtattaagcgttttttaaaatgttttttgttttttaatttattaggttttttaaagatagtaatgggagaagtgattttataattgtataaaataattttttttttttgaagtttttggtaggaatcgtttagttagtaggaaatttttaatttaatatttagaaaaatagatatttggaggaagagggattttttagattatttttttattttgttttattttttatagagaaggaaattaagatattttttaagaattataagataagttaatgatagaaagtagagtagaattttgagtggaggagtgaaaataatatttattttgtttaaattttagttttattattttttaatggtgtgaatttgtataaataattttgagttttattttttttatttgtaaaatggagagaataattttcgttttaagagattgttttaaatggaatatgtaaagtattattgatatcgtttattaattatatatagtagttgtttttttttatttttttgttgtttttattgttttataagattttttattatttataaagtatagcgtttttttttataaagttgagtgggttttttaggtttaggatggaagtaaataggagtattattttatttttagggacggtttaggagtggggtagtagttatagaagtggtaatatttgtagtagcgtagttttttggttttgtttatgatttatatttttttgttatatagtaggtaggagttattaatttagttaatttagtttttttaatttttttttcgagagggtggttttagattatgttttgttagattatttttaataggtgtttttgttattttgtttaaattaattagagaagcgtagggtttaatattattagttattggggagacgtttggggttagtaattttttgaagatttggttgtttgattagggtagagtatggtatgtaattgggttgggaagtttagtggaggaatgttgttttttggtggagttttttttttggttttaagttgttagttttagtttgtaagcgattagttggttttttagagtagtgttattttttggtagaatgttgtaatggggaatcgtattttttttaagtaaatttttagggtttttcggattttgttttttttttttttttggtttttttttttttttaaaaaaatttatttttttttaggtattagttttaatttatttggtagatatatattgaaaatataagaaattttgggtgttgggtttagggttagaaatataaagatgaataggtatagtttgtttttaaagagtttagagtttagtgttgggggagggggttaagggataattatataataatgtaatgtatttaaataagaatgtgttaagtgttttggaagtcgtagtaattttatgaggatgcggaataggaggaatataattaggtaggtttttaagatttgaaggaaaaataatttggttagtagaatatgaaggaagagaaaaatacgttagggtaaagggtaggtagaagtataaagattataggtatttagaggttttttttggagattttgtgtattagttgatatgaatgttgtgaaggtcgtttgggtgtttttgtataataggaggtaatggggggtagaaggatgttgtgataagttataaattcgggtaagggttagattacgtgggttttgttacgttataaggaggagtttgtttttatttagtagatgatagagatattaaaattggggaatgataattattttagtattttggaaaaaatgttttgattgatattttaaataatgaattggagtttttaaagaattgaggtaaaattgttgggtaagagtttatagtatattaagatgaatagttgtatatatatatattatttttgtagtaatatagtaataatttaaatgatagataataagagtttgaattaagttataattagaggaggtagaggagatagaatattaagataattaggaagtagaatttaaagggtttggttattgattagttgtgggagtgggaaggtggaggagttaaagatattttagatttttagtatgggtggttgggtgggtggttagggatggattgaattgaagtagaaaagaatgttatgggagtaggtttatagagagaaagagtttgattttgtatatgttgaatttgaaatgttagtggaatagttagttgaaattgtatgggagcgtagtgaggcgtgtgggtatggattttaggtatggtttgaagattttgatttgagagttattagtataaatgtcgaagtagaggttatgaataagattatttaagtaaattgtgtagaaggagtgggaagtgaaataaggataaaagtatgtatgggtttaaattttaaattttatattagttatttaggatttagttaggagtatttaattattttatgtgttttagattgaaagaatttaatatagagaattggttataaaggtgttaaaagggtaagaagtataaaaaaaaaaaaaaaggagagttttagaaatgtatattttaaaaaaagattgttatttggaaattagaagttgttattatttttgagttggaatttgtaaatttatttattgttttgtgagagatattgttatagttagttttaatttattagaaaggtgttattttttttaaggttagaatttttgagaaggtatttttgtttaggaggttggagttttgagttttttattttttttgttgttatagttatagttaatagttattagttattgttagttatcgttattgtttagaggttgaagtaggatgttttttagttttttttgttttttgattttttattagtgttttttattggtagaattaaaaaggaagttagatgtttaggaaggttgggaaatatatatttggttgatttttaagttaagtagtttaaaatatagtagaggagggtgtgtgtgttattgagataaagataataacgagtatattgaaatattttggtttgtaagaatttggtggtacgaggattatttagagtattaagaaaagattaaggtagaagtagattagagaaataaaaaagaggtgtgttatgaaggagggtaaggttagtatttttaaatgttatttaaaagttaagaaaggattgaaaagtgtttttagatttggtgattatgagatggttgataaatttattgagagtagttttagtgttgtagtgggagttaattttagattgtggtgggttgagaagtaagtgggaggtgaggaagaaattgttagtgtatatgttttaagtttgttagataaaagaaagagaaagatagaaggggtgggggaagaggtagtgagaaagttttaatgtggtaattaagtaatttgagaaattaatatatgtgaatattgtttaatagtgtttttgaggtttttaaaatttatattttttattttttttttttttttttttaagataaagttttttttgttgtttagattggagtgtagtggttatttataggtgtaattataatttattttagttttgaattttcgagtttaagcgattttttcgttttagtagttggggattataggtatatgttattgtgtttggttttatatttttttttgataaataagtaatagtagtagtaatagttaaaaataaaaataattttatgattttttagatattttggaatagtaatgtgtatatatgtgtgtgtgtttgtgtggtggaggtagggtgttagggaaggattagggtttggaaattatggtaattttttagaaaataaaagaatattttttagtattttaatatttatgtattaatttattagcggttttggtagtggggagatttaggtttttggatagtagaaaagaagtttatgagattattagtggggagatatatgggatatagttatttagagttttaaattaggggttagtaaattttttttgtaaagggttagatggtaaatattttagatattgtgggttattagatttttgttatgagtatttaattgtggtacgaaagtttttatgtataatatgtaaatgaaggagagtggttgtgtttttagtttttttttagtttttttttttattttttgagtattttttttttagttttttttatagattttttttttttagttattttttaaatattggtgttttttggagtttttgtttttaattttttttttatttatggatattaaaatttaaattttatgtaatttttatgtgttacgaaatattttttatttgttttttttttttttaattatttaaaaatgtgaagattatttttagtttttaggttatttaaaaataggtggtaggtaagattgtgtttatagtttatagtgtgttgaatgatgttttatacgtggttagaattggtacgaaagttttaaattaaatttattttttaaagaggaattttagtttttttattattggattggtaattagttaataaatattttgtgttagttatattagtttatttggaaggagatttggggaagaataggagaaattagattgggtggaagggtataggaataggtatagtagatattgtaatttttttgggtgagaggaataaggtagaggggtttaagttttttatagggagtatagtgtagataagattaaggtgaggataaatataattattttttattaagattgtggtgaggggtggttaattttattttttttttttataattttagtttaaatggtaataagtttaaatatttataattatttttttttttatgtaatttttttttattaggattttttaattatttttattataagtattttaggaatagttttttattagtttggaaagtaataattgtgggtaagagatgagtaaggtagttagttttgttttgtagtagtttattgtttattttgttattagttatgaatgtttttgaaaataatggtatagtatcggtaaatttaggaggttttggttttttaatatttagttttgttatttttttttagtatttaaaaatggattttatttggttaggcgtagtgatttacgtttgtaattttagtattttgggaggtcgaggggggtggattacgaggttaggagattaaggttattttggttaatggtaaaattttatttttattaaaaatataaaaaaaaaaaaaaattagttaggcgtgatggcgggtgtttgtaatttaagttatttaggaggttgaggtaggagaattatttgaattcgggaggtggaggttgtagtgagttgagatcgtgttattgtattttagtttgggtgatagagtaagattttattttaaaaaataaataaataaatatataaaaaggattttatttttttttttttagtagagttagattttttggaaaagttatgggtaattgtggtttcgtttttatttttattatttaattttttaatttttaataatgtaattgtttattaatatttttgtgttgttaaattaaatgaattagtttttgtaatatttgatattgttggttatattttattttttaaattggttaaatttttggtatttttgatggtatttttttttagtttttttttttatttttttggcgttttttttttagtttttttgggattttttttttttagtaattttttaagtattggtgttttttggagttttgtttttaatttttattttttttagattatatatttgttttggatggtttttttatttatttttatatgttttttgttattatttatttgttaatgttttttaagtttatttttttagtttagattttgttttgagttttatattatttatatttgaattatttttggttaaatttatttggatgttatgtaatagtagttttttgtttttgttttttttttaaatatggaacgttttatgaatttgtatgtttttaaattgtattttttataatagcgttttttaagaaataaaaaaagtaagtttgatgatagtaattatttatttttgaatttatttttatatagatataatgtaatattaaatatatttatataatattttttattatgtaataatttattatatttaataagtttatttattgtaagtaatagaaattaattttggttaatttatattttaaaaatgaggatttattggaaagatattgatttaatttatgaaatgaaagtaatagttgaataagttagttttaggtagaatagttatagggattttagaagtaggggttgagttgttattaatatgtttatttgtaaaggttttttgtttttttattttttaagttttgttttgttgggagagttttttttattggtttagtttgtattaggtgtgtattattggatttattggttgtggttaggtatagtattatttttatggattagagttatttttagagaagggagaattatatgaaaagtaattattttaatatagttatttttaatatatggtattttagataattgtatgagattatttgaggtataaatataaggttaaatttgtgtattaatgtttaaatagtattttttaattatttaggtgatatatgttatttgtttgatgatttttggtcggttatttgttttattatatatttaaattatatttattatgtgatttaatattgatttattaatttaaaattatatattttacgaattttttttgaatttttgattaaaaaggtttttttaattttattttgaaaagttttaagtatatatagaagagaagaatttaataaattttaatgtatttttatgaatgttaataatttttaatatttaatatttttttatttttgttttatttattgttttgtattttttggagtattttaaataaattttgttattatattttattagtaaatatttttaggtatatttataatagataataattttttttttaatataattataatgttattattataattaataaaattaaaaattatttaattttatttgatttaatttgtttattttttttagttattttaaaaatgtgtaagagaatgaagttttaaatgaaaagtagtgttttataatttttaaatcgtgttattagtttaaaaaaattggtgagttttttattttatgttttataagttattgatggtttaataatgaattttaattaggtattttataggtaaataaagttagtaattgttattttgaatgtatttttattttaagattataagagtatatttattattttttttttttaatatattttaattttttttttatatttaagattttagtgaataataagatgtttattcgagttataaatgtgggttatcgttgatgattttattttttttaaatttttttatttaattgttttaataattttatttttttaatagtttttgaattttttttttttttttttttatttttattggtttaggtttttaatggttggtttttattgattattgtaattttttttataattggtttttttttttttaattttattattttttatagtgttgttagaaggatatttttattatgtttagttgattatattatatttttgtatgaaaattttttatgattgttaatgatttattttttttgttatgatttataatgatttgaagtttatttatttatttttatatgtttttttaggtgaaattttattttttttaggaagttttttttgaatttagagttgagattaatagtttttttagtacgtttttaaagtattttgtgttggttattattattgttttaattgtattatttttttttatttatatgtttgttttatagttattttatttttattgtaaggtttttaggggagggtgtattatatatatatatatttttattaagaggtttattaagtgattttttattcgatgaataaatgggttattagtttttgaaggtgttgaattgagaatggaagagtttttaggtattagatgatgatggattgttttttttaatagatgttttaaaggtaaattttattaggtttatttataagttatttttttttttttttttttgagatggagttttattttgttgttaaggttggagtgtagtggtacggtgttcgtttattgtaatttttattttttaggtttaagtgatttttttgttttagtttttggagtatttgggattacgggtacgtgttattatattcggttaattttttttttttttttttgtatttttagtagagatggggttttattgtgttagttaggataattttgattttttgatttcgtgatttatttggttcggtttttttaagtgttttgattataggtatgagtaattatatttagtttttatgagttattttatatttttatagttttttttatatattttattatttttttaattttattttaggttttttttaagttttttgttaattattattttttttttattttttgttattttttgttttagagagtaaatttagttatttagtttttatatttatttttatttttattttagtatatttttttatatttatatttatttttttttttagtgatattattatgatgtagtaatttttataattattttataaggttataatttattatttttattatataaataagaaaattgggatttagaaaggtttatttatttagtaaatatttattggttattttttgtgtttagtagtatgttttgtattagatatttgttattattatatttaaagtttaatgaaaataaagagatattaaataagaaaatatataaatttataaattaaaaggtttatatatatatatatataaaattttttagaattgataaatttagtatagttgtaggatataaaattattatataaaaattaatggtgtttttggatataaatagtaaattagtgggaaaagaaattaaagaaagtaattttatttataatagttataatttttttttttattaaaaaaataaaatagaatatttagaataaattaaggaggtgaaagatttttataaggaaaattatgagatattgaggaaaaaaattgaagaggttataaaaaaatagaaagatattttatgttttcggaagaattcgtatcgtgaaaatgattgtattattaaaagtaatttatagatttgttgtaatttttattaaaatataaagatattttttgtagaaatagaaaaaataaatttaaaattaatatggaattatagaaaatataaatagttaaggtaattttgaataaaaagaataaagttgtagatattatattatttaattttaaaatatattataaagttatagtaattaaaagagtacggtattggtataaaaatagatatatagattaatagaatcgaataaaggatttagaaataatagatttatattttaatagttaattgatttttaataaaggtattaagatatttaatgggaaaaggatatattttttattaaatggtgttgggaatattgaataataatatgtagaaaaatataattatatttttattttttattaaatataaaaattaaattaaaatggattaaaaatttaaatgtaagatttgaaattataaaagttattgtaagaaaatattggggaaatgtttaagattttgagtaaatattttttggtttaagattttaaaaggagaggtaatgaaagtaaaaatatataaatgggattatattaagttaaaaggtttttgttatagtaaaggaaataattaatagagtgaagagataatttttagaatgggaaaaaatatgtgtaaattatttatttgataagggattaataattagaatatataaggaatttaaatttaatagtaaaaattttttaaataattttatttgaaaatgggtaaatgatttgaatagatattttttaaaagatatataaatggttaataggtatatgaaaaaatttttaacgttattaattattagggatatgtaaattaaaattataatgagatattatttgaatttaattaaaatggttattattaaaaagatatagataagagatattggtgaggatgtaaagaaaggggaatgtttatatattgatggtagaaatgtaaattaatatagttattatggaaaatagtataaaggttttttaaataattaaaaatagatttattagatgatttagtaattttattgttgggtatatatttaaaagaaaggaaattagtgtattaaagagatgtgtatatgtttatgtttattttagtattatttatagtagttaagatatggaattaatttaagtgtttattaagtgattggataaagaaaatgtggtgtatatatatataatggatattagttagttataaaaaagaatgaaattttgttatttttagtaatatggatggaattggaagttattatgttaatgaaataagttagatatagaaaaaaaaatattacgtttttataagtgggagttaaaaaagttgattttatggaggtagagggtagaatgatggttattagagattgggaaagggagggggtggaggggggatgaagagagatttattaatggttataaaaatatagttaaattgaaggaataaattttatagtgtttgatagtatagttgggtgattatagttaatattaatttattgtatattttaaaatagttagtagatttgaagtgtttttaatagaaggaaataataaatgtttgaggtgatggatattttaattattttgatttgattattatatatcgtatgtatgtattaaaatattatatgtattttataaatatgtataattattatgtattaataaaaaataaaaaaaaataatttagaagtttataaatttggatggaataaaaaaaagttaattttatttttaaaaaatttttattgaaatttaattttatgaatgtagaaaataaatttttgtagtattagttagtagttgtaatattgttattaatagaaaatattattaattaatatttttatattatattatagttgttatagatattttaaaatattatttataattatgggagttgttaaatttgttaaaaaattatgttttttaatgtattagtaaagaaatattgtattgtattaatatagaaatatatattattagattattatacgtttttttgaatatagtagtgttttttatatagtattaaatgtgattatatagtttatttttatttatagatatatttatgataaagtttaatttataaatttgtataggaagagattaataataaaataggataattatattgtaataaaagttatgtgaatatggtttttttgttttatatataaagtattttattgtatttatttttagattaggttgattttgggtaattgaaattatagaaattgaaattgtagttaaggggggattattgtattttgataattatagtttatattttattttatgtatttataaatattattagataagatttaaaggttttattaaattgttaaaaaagttaatggtatataaaaagtttaaggagttttgatttaattagttatttaatgaatatgatattttttttggaattattttttgttttagtttttttatattatgttgttttgtttttttttgagattttttattggttttattttttatttttgttttttgtatgaagatgtaatttaaagtttaattttttattttaaattgtttttatatttttttttttataaattttagttattttcgtggttgatttaaatattattttaaaggtgatttttaaatttgttttttttaattttttttttttaattttaattttggattttaaattttttgttgtgtttagtaaatagaataatatgttatttagagttagttgggtttaaattttagttttgttatttattaaaggtgtgatattaggtaaatattatttgttatggtttgaattttttttttaaaatttttgttgaaaataattgttattttgatagttttaagaagtgggatttttaagagttaattaggttatgagggttttgtttttatgaatggattaatgttattaatgtaggtatgggtttttatttaaaaggggatattttgaggtcgggtatagtggtttatatttgtaattttagtattttgggaggtcgaggtaggtggattatgaggttaggagatggagattattttggttaatacggtgaaatttcgtttttattaaaaatataaaaaattagttaggtttggtggcgggtatttgtagttttagttatttgggaggttgaggtaggagaatggtgtgaattcgggaggaggagtttgtagtgagttaagattgtattattgtattttagtttgggcgatagagcgagatttcgttttaaaataaataaataaataaataaataaagggtatattttggtttttattttttttttattttatgtgtttgtttgtttttttgtcgtgggatgatgtagtataaggtttttattagatgttaatgttatgtttttggatttttaagtaattggaattgagttaaataaattattgtttataaattatttagtttgtggtattttgtgatagtattagaaaatagattaagacgttttttgtttttgttgttttatttgaaaattgagggtgataatattagtattgattttatagggttataaggattaaaagagttattatatgtatttattgtagtatttgatatattttaattatttaataaatgttttgtattattaattatatttttttttaatttcgatattttaatttgatgtttattaatatggacggtgttagttattggaagatagagtttttatttaataatataattttgattaagttattagttaaaaaattttagtggttttttattgattttaaatttaatagtattggaaattttttataatgtgttttttaatataaatttattttttattttttttttttttgttttattttttgtagtttatgttttggttagattggattagattattttttgtgataataatttgtgttgttttatgtttgtttttttttatataattttaatgttttaggtttgaaggtaataattttgtttatgattatttttttatatatggtattttataaaatatatatattttaattttatttaagttatatatttatttatatattaatttatttttatatttgtttaatttgtgagaatttaatattggttagatattgtgttaggatttagggatattaaaaaaaaaaaaaaagtaaagtaagaaaaagaatgtataatggttttgtttttaaaattaaggtttagtattagagagaaatatgtaattatataaatgttatttattgtggaaagtaaaattataaggggaagggatattaaagaatgagtagttagtttaatttgaatagtaatattaagttttttagagatgttatttgggcgtatatagattggggaaaagtttattttatatagaaagtgtatatgtgtaaaatatagaggtatgaaataaaatgatgtgtttgggaaatagtttaatatagttggaatatagggtttaagaggaagtggttagatatgaggttggaaagttaggtagattgttttggtaaatataggaatttggattttattatatagttaataaggaataatatagagttttaaaaagagttatggttagggttatattttggaaagtttttttttggtagtattgtggtagaggtagagaggaaagtttaaagtagtattgtttaatagaattttttgtaatgaggtcgcgcgtagtggtttacgtttgtaattttagtattttgggaggttgaggcgggcggattacgaggttaggaattcgagattaatttggttaatatggtgaaatttcgtgtttattaaaaatatagatattagtcgggtgtggtggtaggcgtttgtaattttagttattcgggaggttgaggtagaattgtttgaattcgggaggtagaggttgtagtaagttaagattgcgttattgtattttattttaggttatagagtaagatttcgtattagggaaagaaaaaaataattttttgtaatgatataaatgtttaataatttgtgtttttttatatgatagttattagttatatgtggttattgagaatttaaaatgtggttagtgtattgaggtattaaatttaaaattgtattaatttaaatttaaatagttatgtgtttagtaaataatttaggagattgttggtatagtttaggtgatagaattaggatagaagggtgagttgatggatagttaagaggtaaaattatgagtttgtaagggtgtgagaaaaggaaattaagaataggtttttagattatagattttgtggttaaatagttattattatttaggataatagaagagaaagagtaggtttagagtgtatagtgattttattaattttgaatatattggtgtttgagagttattttagtgggaatatttagtagaaagtttagtttagagagttgtttgaattaaagatttagattttagaggttttgagttatggagttagattatttagagaagttgaataaaattagaagtaaataagaattatagtaaatattaatatataaaaaggggttaaggaagaaaaatttattgagattggagaggaatagttatataaataggaaaagaaataagtgagagtggtatagaagttaagggtagagagaatgttaggaaggaaatatgattaaatgtcgaatgttttagaggttaaataaagtgagaattgtaaagtgttttttgattttgttagttaggaggtttttggtgatatttgttagaaaagttttggtggtagtagtttgatagaggtagtttgaagagtggggatggggaaagagaatgtgattaagaattgagatagtaaggataattttaattttaggttttggttgtgtaaggaagtcgagagatatgagtttttaagagggtacgatattgagagggttgttatttttttgttagcggggaaattaagagaaaagtttaaaaaggttaaaagggggagaagggaagatagttttcgggtaatagagaaggttgattaggttaatagtaaaggatttttttaaatcgaagggaggatttttagtgaaatgagaaaggaatatataattgatttagtttgtaggtgggaaatgggaagttagttttgtaaattggtttttttgttttgtgaagtgttatttgtcggtgaggagagattagggtttgtagcgtgaaaatttggattatattttgggtaattaagggagaggttatcggttaatgataaattaaaggtttattttttagttggtaattgaattattataatattttatgttattagttttaaaattttggggggaatttatttaagtttgggagaggagagattataattttaagagtataagaggtttaaacggtttattacgaaataaatagagaaggaaaagttattagttggtaaatatcgtagaaggtagagcggtttagggatttataggttttattaaagaaaagtttagcgtaggtttacggtacggagagattttaaggttgtttaagattaaagttaaatacgaagtttatatttgcggttcgtattttattttttcgcgcggtaggcgcgacgagggcgagaaattttttttttagtggtcgtattatacgatattagggaaggggtttttttttttagatttttatatttttaggtttaggttttattttttttcgttgatagtttagtagcgtgcgttttcgttggatttaggttaggattagcgaagtcgtattttatatttatcgaggaggaaataagtttggttattcgaggttatttcgttaggtcgcgggtagtgggggagggggcgttgaggtaggaggttagtattcgggcgcgggttttcgttttacgaaatgcgcgcgttttaagtttcgtcgtcggagatgcggtttcggttcggacgtttgcgtattacggtttttttcgtagtttttggtttttttttttttttttttagttagggcgtatttttgcgtttgcgttgtgtgtgtttttggtttgcggtagttatgttgaattcgtatggagaggcgagtgggggggatagagtttaggattgcgggataggaagttggggatatggataagtagtagcgttatagcgttttgggtttcgggatataggtttgggttatgcggtttttttggttttttggcgcgatttttaggaacgttcggaaagttggttttcgtggttgggggaaaggcggggggtgggggggaagcgggtacgtgatttcggttagttaatttgggtgttgttgacgtacgcgcgcggtttcgatgttttttttatttttttagttcgttcgggaagggaggggttgggggttacgttttattttttagtacggtttcgttttttgggggggggttgatatttcggattatatatttcgtattaagtcgagggtaattttggaggttttttggaaggttttaggatttaggtgagaaggggtttttgtggggcggagatgttagttaagtgtttaattaatggtggggagttcgggaggggatttttggggtttaggaaagaattttgagagtgggaagatttgttttttaaattttttatagttaatgggagcgtggagggggggcgagcgggagagggttatggggggggaggggaatggttagttttatgttttcgtatttattggagggtaaaggggttagggggcggtgtggttttttttattttattcgttttttgggggtatagtagtcgggagttaggtgagaagggatttatcggcggtcgagggaggggtgatttggcggtgggttgaggagtggtggttgtggtttttattcgtggatgtgaatgttttaggagttggttatttatgttgtgaattgaggttgtttttaggcgttaattttttttttttttagagtttttggagggagtattgttgtgcgttttttgtgttcgcggtaggggagttttagtcgttatatcgtaggttggaggttacgtttcgagtcgtttatcgaatttgtgtgtatttacgtggatacggtttgtggggttttttgtttttgtagggtttttattgagtacgtgtttattttaggttggggtgtttataagttgaaagtttgaggtttgtttaggaatagaaattaggtttaaggtgggtgttggtagtagggggtttagatagtatggtttgagatgcgagggaggttcgggatttggaatgattttatagtttttaaggtttcgggtttttttagggtggttttttttatcgttttttttatttttttttttagttttgaatagttttttttttgtgtattgcgggggagggaacggaaaggaggaaagagttatttttttaaattattgagtagtagtagtttttttggtgatttatgtgggggaagggaggatagaggatcgggaggtagtgatttttcggaatgtagggaataaacgagagtaatgtttggttgttttttttttaaggtttagtatttttttagttttttaagtttttattttatggtcggttttttgatgggtttttgttttggtttgtagagtttcggtggagaaaagtagatttgggaggttgggtcgttagggggaggggaaaaggtttttgtaaagttgttgtgttattgttttttatgttgtagttatttaaacggggtcgtttgtatttttgggggttagggtttgatttttggttgggggaaggggattttgtttttttgacgtttattttttttcgttttttcggggtttgttttattcggggggttagaagataggagattggcggttattttagacgtagtaatcgaggttggagttgaagggttattgtagaggagggagggtggcgtggttgtagtttaaggatttaggtttttacgagtttttttcgggcgagggggaattttatcgtatatttgtttatttacgttgattattttttttagatacgtatataagtttgttttttttttggtagcgaagaaaggggaaacgggggaggggacgttttattaaagtttaggttttttcgggtgggggagatttttttatttttttgtaagggggcggggacggttttagagatgttttggagattttgattttgggttttggttgatttatagagtttgtatttttatttagataattaagttaggaggaagatttaagagtaagttggggggagggggcgaaattgagtttttaaaatggtttttgttttttttcggaggcggacggtcggggggaggggaggaggggaggagggggagggttagtttgagtcgtagtcgtcgtttttttcgttcgtttttttttttggcgttgatcgatggattagtcgtttcgtggggaggatttcggattttggtgggggggcgggggggttttttcgttttcgtggcggagggtttttgagaggcggatacgggtgtgtttttgggggtgatgtggcgtgtggggggaaaggttcgagttcgtttggagggggagggttttttttttaagttattttttttaggatttgttttttttgttttgagtcggacgtcggaatggagtttgaggaagaggtgaggtgtgttgtattgtatagggtagatggatgcgtttggagattttaattttatttttagggttgtcgaggatttttcgaacgagtagaaatgtattggtaattgtaggtgtgagtggggagggattagaaaggtgtttggacgtgtaaatttgggagacgtattttagtttttgtggtttttgggattaaatagtagtaaataatgttttgttcgtttttttatcgtttggtttgagggagggagtggagtattataagattttggtaatattgttttagattgtggggtatgggaacgttagatttttttatcgtcgttttgaagttcgtagttgttcgttatagaggagtaggtcgcggtttttaagatggcgttttttttttcgttttagatttttcgttgttgttgttttatcgtcgagaattattattcgttaggcgttttgcggttatatttttggcgggtttaggtaggttacgtttacgcgatttttttcgtttttttgttttggttaatggaggagttacgaatggtacgatttgttcgagtttggtagtttttagttgggttgtgtatggaagtttgggaagattttgttggaaggggaggcggggagagagtgttggaggttttggggcgatggttttcgtattttttttaattattttttttttttggagtcggcggattatagtttagttaattggtttggagatgtggcgggttgttatttttttgtgggtttttgcggtatttttttgtttggtgattgatattttggaaatgaagtttatgacgttatcgttgcggttggttaatagaaaaagttttcgcggagaggtgttttttttttttcgatttagtttttttattcgcgtgagcgagcgcgcgcgcgcggagggggtggggaaaattttaagtagggtggcgcgtatgagcggcgaagtttttttttttcgtttatatataaagggttggcgcggggttcggcggcgttatttcgtgttggagtggagtagtttttagaacgagttggaggattttgtttatcgatatagagttttcgagtcgttcggggtcgttattataatttatttttattcgtttggaaatggttttcgtttcggtttatgattggttttagcgggtagtatagattttttagaagtttttggagtttttttttttcgggtttcgtttaattttcggagtttgtttattttttttatttcgtttttaagaggattttaaagatggaggcggcggttttttaaattatttttcgtgtttattcgtttttattcgagatcgaaacgggatttcgtcggtttcgtaggggttcgataagaagagggaatttttgtagattaatagcgggttatattgacgacggtgtttgagatcggggatcgttttttgaagagttagtttttttttagttgttcgttttagttgaggtcgtcgttatttttttgttgttcgtcgtttgtagagcgcgttaagttgttcggagtttttcgagaggttttaaagagattgttttcgtgtcggttaggtagggggtttgtcgtttggaggtttaagaggaacggtttttttttaatttagcgggttatgttggatcgggcggtgaggggaatcgaggttattcggatttttcgcggttgagggtagcgtcggttttttgcggttaagatgttgtaaaacgtgattttttataataagtacgttttcgcgagtcgcgtgtgggaaggggatgttgtagggcggcggtataggggtgtggggcgtcgtgttgggagtattgagcggtttcggcgcgttgttgttgcggcgtagttgtcgattcggtcgcgcggagggaattgagcgacggttttggaacggtggtggcggttcggttattgttcgtggaggggaatataggttgttaatttatacgttattaatgtcgtcgtggtttagttttaatcgagttaggtagagttagtttgacggtggagtggagtgaggttgaatagtaggtttggcgtttggtgggtttggtatttagcggcggtttgttagttttttaggggggatttacggatatttttagcgttttgtagggttgttatggtgacggagcgtttaagggattggtaacggggatttttagagaagggtaaagggattattttttcgtgtgtgtaggtttttaatgtttagggtatgttattaaattttttgttttttttgggtgggtgggttgtgtgtggtgtttgttggtgtagggattgtttttttttaatattaaaagtttgatttagggtaggagggtagagttaaggtttttagtttagttttgcgatgtaaataatgagatttttatatgatgttttaatttttaggtggtaggaaagattgatcggaggagtattagagggattgtaaatgaattattgttagcgtttggtgttcggagttggtgttatagggggaattggtagtggaatcgtgttgtgtagtgggtgggtggaagggggttattatttggtgattttgattgttttgtacggttttttgatttttttggagtgaggagattttgatttggtgcgaataattttgagggtttggaagttacgggttgtgaagtttgataaatttttttttgtttgaatttgtttttaagttgatatggttttttttttgggtttttagtttatgttttgttgtggcgtgaattatttagattttgtggaagatggtgtttttttttttatttaggtggattattttgtgttttattagtattttatggaattttttatagttataatttgttttttttttttttatcggcgtttaattattatggtaattattaaatttttagtgaggaggaagtttggggtttgagttttttaattttatttattttgtttaatttttatttttatagggttgtagttttgagatgtcgtgttttgttagaaataatttgggagttttttaaaatatgaaaaagaatagatagagtttattagatttaagaaggtgggatttagatagtatattaaaaatattaataaaaggaaggcggggttagtaataaaagttttatagattgtttggatattgtttttgtttaagaagtatttggtataagtttaattattttattagggttagtatttggatttattagattattgtgtagatgtattttttttttatttggacgatattgttttaattttgtttttatttttataggttttttggggaagggaatgtagggttgttggggttgggtttagaagtagtagtattagggaaaaggattcgaaaatttttttttttgtatgagggttttgagagttttataatggtttcggtgtttgttttgtaatttatttttgttaatttattattttcggaggtgtttaattttaaaaagttaggacgagttattaattagttgtaatatttatataaggtagtgatgaaggttttgtggaaatattagttcgtatggttatttcggtagtttgtggatgttgttaaattgggtttatcggtgagtagagatattggagtcggggaggtgtgggatgagtaagaatgcgtgtgaatgggggtggtttgtttagtgtagatgttgcggtttttagggagtttttattttttttttgtagggtagttagttattagatttttgggtattttggttttttgtgattgattcgatcgtttgttgtaattattttggtatttttttttgtgttttttatgtgtttttttttaatttttgtgttttggttttattttatagatttttatttcgggttgggagaggattacggtggttaaaatttttagttttttttttttttttatgtagtttatggatagttagttttagaggtaatgttataggatgggaagtttttagagtgggtgggaggtgggtggttagagaaaggtagtaggggtttttttgtggatgttaagaattttttttatttatttatttattttgttttatagtttaattggggtcgtagtttaattgtttttttgatgtatagggggtgtgtgtgtgtgtgtgtgtgtgtgtgagagtcggggatcggtagtttttttataagtatttatttttttgtggttttgatttaatatttttttatttaggattattataaaattataaaatagtttatggatatgggtattattaagaggagatttgaaaataattattattgggttgttttagagtgtatgtaagattttaatattatgtttattaattgttatatttataataaggtgagtttttttgtgtgtttatttagtaggtggggagaaatagtaatttttattattgttggatatgttgtttatataaagtttaaattttttgttattgaaggtgttatttaggtagggtagtcggagttttaaaaatttgattttagatggtattattgaatatagtgatgtgattttagagttttagttgaaggttatttagaatattttatatttgggggtggtggttttgttttttagaaattattagagatttgagtagattagggatttgtttttttgttagtttttaagtttttttttttttcgaattttgggagatagttaggagaaagtggaaattagtagtggtttggagtagaaattttttttaagatttgatgataagatgattggtgggggtatggtaatggtttagggtttgaatgtttttgagaaagatggtgtgtatttattttttgttggtattttttaattttttttattgttgtttgtgtttttatagtttattgatgatattgttttaatggtataaacgttggaaaagatatttttatagaaggttgtattaatgttataagaagaataagagttggtagtgattatttttaagaatagttataagaagggggttaagttggtaggtaggaagagtgggagttttgtaaatggataatttaaagatggggaagagaattaaattatatttttttttttttttttagcgttttagggtagtgttattagtgtttattaggtgtttgtcgttttttttgtgttatatatagttttgtatatttttttatttgagatatttattattgtttttaatattttttatttattagttattttttttttattttttaagtttttgtattttgttggattttcgttttttgttgttattgtagtttttttagtttagttttttgttaaggtatgatttgtggattttttttgggtagtagggaggtaagggttttaagtaaagtgggtttggagtgataggttttttattttgtttttttttgtagaaaaaaggcgtaaagcggaaagtagatattattatttttatatttatagttattttggtttttggttttttagttagtttttttgggagttttgagtttaaggtagtacggtttttttttatgcgtagagagagtggtcgttttattaagtttttacgtaaagatttgtttgatttttagtaataatattagagttttaagaaaggaaagtttttagaatagttaaaatattgtaatggtattttgaaggagttattttttaagaagtatgttgtttatgtttggtttttttataaattagtggatgtttttgtatttggtttgtatgattattatgatattattaagtattttatggattttagtattgttaaggtatttattgtatggggtagatgggatgtttaagtagtgatgggagtttaggtgtaaaataataagtttttttatgtgggtatatagtagtttttggtttttggtattttatttttataaaataatagtggaatagaaggtttggtgttttgagaatttgtattttttggagtttgaaatagtagggtggggtttttttgttttgagaaaaatattgtttataattaagtattaatgtggtagtgttgggttaaggaagttatagggtggaaagataggtataggttatttttttgttatttagaaatgatttttttttttagatataaatatttttttaatttatttaaatttttttgattttaaatttgaattttagggtatagatttttaaggttatttttattgtgtttttaagagagggttttttttgtggtgtttggggttggtagggaaaggtgagtttttttgtttgtgtagtttttgatgttgtttttttttgtagcggaagatggagaatcgtgattatcgggatgtataggagtttgttgttgatgtacggtttatgttttttaattgttataagtataattttttagattacgatgttgtggtaatggtacgaaagttataggtgagtggaaaggttggagtttgaaaaataaatggtatggggagttattttgttatgtgtgttgtatagttttaacgtgagggttttattgttttgtatagttgtaaattggagttatattatttggtggttgggtatgtagggtattgtttattagtatagttttgagtttgtgtttttttttaggatgtatttgagtttcgttatgttaagatgttagatgaattattagaattagggtttttattagtttttattgttatgttttttggtttggttaaatcgtttttagagttttttagtgaggaaagtagtagtgagagtttttttgaggaagaggaggaggaagatgaggaggacgaggaggaagaagagagtgaaagtttagatttagaggaagaaagggtttatcgtttagtagaattataggaataggtattttgttatttttgaaagtttttattgggtaagaggtttatgttttttgtttttattttttttttttgttattttatttttatttattttttttattttatgtttttttttttttagtttcgggtagtatatgaataattggttgttttgttttagggtttaatatttaagtttaagaggaaaagagagaaaaaagagaaaaagaagaaacggaaggtagagaagtatcgaggtcgagttggggtcgatgaagatgataaggggtttagggtatttcgtttattttaatttaagaagtttaagaaagtaagtggtagtgggggtggtagtgttgttttaggttttttcggttttggattttttggaggaagtggtattaagtgagttagagtaggaagtagagattagtttggttatttttgtttttttgggggatgttatttttttttgtaaagataattttaaatggttagttaatagatataataggttttgagtagtggtttttaatttttttggtattagggattagtttcgtggaatatagattttattatagatagggtttgaggggatggtttttgggatgaaattgttttattttagattattgggttattggatttttataaggagtatgtagtttggatatgtattatgcgtattttatagtagggtttatgtttttatgagaatttaatgtttttgttgatgtgataggtagtgatgtttatatgtcggttgtttattttttgcgtagtttagtaataggttacggattggtattggtttgggggttgggatttttggttttgggagttagggtgttttatagttattttgatagtgaatttaaagtagttataaattagaaatatgaagatggttgtgttttaaaaagattttatttgtaaagatacgtggcgattagatttgttttttgggttatatagtttgtttgttgttttaaattaatgagtttagatttgttttttatggcgtagtagtttttggttttttggtgtggttttgtgtttttttttgtttgtttttttttttttttttttttttttaaagattttaggttggagtgtagtggcgtgatttcggtttattgtaatttttatttttcgggtttaagcgatttttttgttttagttttttaagtagttagaattataggtatgcgttattacgtttagttaatttttgtatttttagtgcgtagttagtttatgtagttttagtggagacggggtttcgttatgttgggtaggttggttttgaatttttgattttaagtgatttgttcgttttggttttttaaagtgttgggattataaatttgagttattgtagttggtttatggtgtagtttggtagtgtttaagggagtagaaagatttatgttagtatatttaaataggtatattttgttttattgtgttttattttacggagttttttttagatattatttttttttttagttgaagatttgtgataattttgtgtggagtaagttttttaatagtttttttaatatgtttgtgtgttatatttttagtaatatttttttattaaggtatgtacgtatattgtttttttaaagatatgttattgtttatttatagttaagagtaaaatgttttgttttattatatagtgttttagtagtttattttttatttggttattgaatggaaaaatagaagttttattttgggtaggaaataggattattgaattataatagtgggaatatattggaagaggttaatgaagttttttttgttgataattttttttgtttttaggttttttaaaaaggttataaagatagttttatttgttttgtttataggttatgatttagaggaggaggaagagagtaggtttatgagttacgatgagaagcggtagttgagtttggatattaataaattatttggggagaagttgggtcgagttgtgtatataatttaagttagggagttttttttacgtgatttaaatttagaagagattgagattgattttgaaatatttaagttatttatatttagagagtttgagcgttatgtttttttttgtttacgtaagaaatttcggaagttttatagtacgtatgaaatgaggtttattttatggttttgaggatagttgaggaaagatggtggggtttgtttgtatttaggattgttagtttttaggataatgggatgtgttggttggtagttgacgtttaagaagggaatttgggaattttaggggtttataataagatgtttggggtaattttaatgtattttgataaattttttttattagttattaagaagtttgtgggaaagataaaggaggaattggttttggagaaaaagcgggaattagaaaagcggttataagatgttagcggatagtttaattttattaaaaagttttttaagaaaggtgagtatatatttttatgttattatagattgattttattttgtttttttgattgttttttattgataaatgaagatttagatttgaacgtttttaattttcgaatttgttttgtagcgaatgagaaaatagagttattttttgtatagtaagtagtagtgttacgttttagcgtttttagttttagtttagattttagttttttttttttttcgtcgtcgtttttagatattagtgatttagatttaggttaaggggttaggttagatggggtaggaaggtttcgtaggatcggatttttagattattttgttttatttgttttttttttttttgttgtgatatttttttattttatttttttttgtttttttttaggagagttggttttgtagtgggggagggatgtagggatatttattgaaggagggatatggataaaataatattgaatttttagttttattggggagtgattttttggatatagagtttttatttaaaatggggtagggtaagggtgggagtgtgtaaagttttgatttggagttatttgaggttatagttgttttatttatttttaagggttttgttttgagattgtttgttttaatttattttaagttaggtaaggttggggggagggtggggtcgtggtttttttagtttttatggggagggaagaagggggagttttttttttacgttgatttttttttttttattttgtttttttttttttttttcgttttatttggggttttgggggttttagttatttttttatttggttttttggattgtttttgttgattttaatttgtaaataaagaaaatattatttaagttttgagttattttaatatttgtttttgtagtgttttaaaaggaatattataagaattgttttgataattttgagggaaatattattgtagtgagaaaaggtaatagttaatttataattggattgttttaatttttaaattagtaggtttttgttgtgtttttaataaagtaaatatgatttttgtaaattgagtttttagaagtaatttttaggtttataatttgtttttgtttaaatgaaaaatagtattgtggtttatttatgttttaattaagaatttaaaattttgaggtaggttttaggtttttttttgtggtattggatgtgtgaatttttttttgagtagatttaaaatatgagaaaagggtgggaggtagtcgaatataagtattttatgtattgagtttattgttttttaaaaggaaattggtttgtaattttagtattttgggaggtcgaggcgggtagattacgaggttaggagatcgagattatggtgaaattttgtttattaaaaaaaaattagttgggcgaggtggcgggtatttgtagttttagttattcgggaggttgaggtagtagaatggcgtgaattcgggaggcggggtttagtgagtcgagatcgcgttattgtattttagtttgggtggtagatatttcgttttaaaaaaaaaagtaattgggtttattatattgttaaatattgttaaattttgttgttatggttatatataaatttatagatagtttattagtagaatattaaagagtattttaacgattaaattataaaattgtgttttttgtatatttttttgttttgttaaggggagagaagggttgtataaaaagtttagggggttgggatgtttgtattttggaatttggggttttaatattggaaaagtgagatatttgtttagtatagtgtattatagtaggaaatttggatagagatatggaaattagaattaggaatgtagtaaagtaaatggtttattttgttgtaaatgatattataaattaagtgtagggtaatattataaattaaatgtaggaagtaataaattttattagtgatgtttagttttttttaggaatttcggttaaattggggtttgagtaataatttttaaaagttcgggagatggtaataaaaaattaggtttgtgaattatttgttattgtttgttaagtatttagagggaaataaatttttgtttgggtttttttgttaatttgtgtgtattagtgaaagtttttgagttttttttgagttttggtttttttttgagaataatagatgttgaggattcgtaagtatttaatagagacgcgttgggtaataggtgatgagatataaattaaagttttgaaaatcggagtaaatagatttaagttaagtgtatgtttatgttaaggattatattttattttagagggaattgaaggatttagttggattagttttgggataaaatatagaatattttgattgtagttttttttgtttatgtatttttaaggtttgttttttgtagttcggaaaaataaaagttttaatttgatattggaggtttttgagtatttaattttttgtaaatggaatttagatcgttttaaatgttttaagagagagaagggttggttgatataggggttttagatttgttttaaattaattggattagttttttaattgattttagtttgaatttattttaagtttgttttatttagggattgtaattgttttaggagtttggttgagttttattttggttgttaaaggattttattttaaaatagtagtttttagtataatttaaaggattagtggagttttgtgggtattatttttttttatgttttttttagtttttggaattatgggttttattgttgttgttttttttttttttttttatgttgttatttattgttttttattgcgtttataggaagttttttgttgggttgtgggggaaggtgagagtcggttttatttatttagttatatatttattgagtttttttgattgtttttttagtaaattgttaggtttgtagatttggacgttgttaagttagagggtataaggtgaagataagataaggttttattatggagtttgtttagtacgaatagggtgtaattattaattattatggtgtggtaattatattgattgaatttaagatataggtatgatttggtttttatagattatttttattgtgtatttatatgtggattttagttttagtttgtttgtaattttttttaaagttttgtttttaggtttattcgggattattttgattggaaggttttgtttttatgagtgattagtatgaaggatttttaggataaggattagaggtgattggtgttattttggggtttagtgtaagattggaggaagatttttttgagtaattagagagtggttgtaatggagagttgggaaggagatgtgggaatggtagtatggaattaatgtgttgttattatgattttatttttttttgggttattattttaaagatatttataaaattttattagttggtttttagtattgaatgagacgatagttttttgtttttaatttatattttaggatcggggaaaggggtagtattagataattagttatacgatttttaataaaaataagtaattttaataggataatgtgtagaggtttagtaagaatttagaaaagagggttttttggtttaagttgagagttatttagatattttagaacgatgagtttttttttgtttgtaaggggtggatgggtgggagtagggagtagtgaatattgttagtagaagaaatagtaattgagaaggtaattaggtgatgttgaagtagtaaggatgaaggtgagtgttttgagatgttttgaatttatattttaaagattaatagttaatatttattgagtatttattgtgttttatgtattgtgttaaataaaaatttattttgtaaatttatttggtttttattataattttgtgaggtatattttgtttgtatttaatagataaagaaatgaggtatagagagattagttaatttgtttaatattattatattgttagtgagtattggaggtgggttttgaaattaggcgatttggttttagggtttatatttataattattgtattagatttttagtgttgtgggttagtagggagttaggagatagatatgttttaaggaaattgtattagggataattatgttagggttggtggggtgttgagagtggatagtttagaaagtaattgtagtagttaattttagttagtgagaatagtggtgtagaagagaaaggtagtaatgtagatgaagaaatgtagatagatttgagagttatgtaggagttaaaatagatgggatttatttttaaaaggtttttgtttttatatattaaaggaatagtagagtatacgtgtatttgtagatatatagtttttagagtttttagtatagagttttttaatagtggaagtttgatattttgttgattaaaggagtgttatttggttgattggtagatttgaatggagttttttttagtatggtttgttaaaggggtaggggttttgaggtttttgtagattgttattgaaggtatttggcgttatttgttgggcgtgttatttacgattgttttttgaatttattgttatttttgtgttttgttttcgaggttaggtggtttttttttttttatttttttaaattttaatttttaaaatgtgagtttttatttttatgatttagagggttataaaagaaggagattaggtttttttagtttttatttttttttatttttgaagtattttatggggtttttttagtattttattttatattgatttatttatttatttttaagaaagaggatttttgttatttaggttggagtgtagtggtgtgattatagtttattgtagtttcgattttttgggtttaagtaatgtttttgttttagttttttgagtagttgggattataggtatgagttatcgtattttgtattttttgatttttttgatttgatattatttgtttttagtttttatattttttagatagttattttttagtttgtttttttaaagtttttgtttttgttttttataatatattgttttttatgatatttttttttgttttttttttatttgtatagtatttttaagtaagtttatttatttttttggaggtattttttatttataaaatttgtgtttttgtttagattttgtattagtttatttttatatggttatgaggaaatatttgagattaggtgatttataaaggaaagaggtttaattgatttatagttttgtatggttggggaggttttaggaaatttataattatggcggaagatatttttttatagggtggtaggagaatgagtgttaaagtgaagtggggaagttttttataaaattataagatttcgtgagaatttattattacgagaatagtatgggggaaattgtttttatattaaattttgagttaaagttttaagtgtttaatgtaatgtttaatggtaaggttttataagttcgtgtatatatttttagaaaagattttatttttttttttaaatatgtttttcgtagtgagttttttaagttagtagtttttagtttttttggtattaaggattggttttgtggaagataatttttttatggatggaggcggggagaatggtttttagattaaattgttttattttagattattaggtattagatttttaaaaggagtttgtaattttttttcgtatgtttagtttataatagggtttgtagttttgtgagaatttaatgtcgttgttgatttgataagaggtagagtttgttcgttgtttattttttgttgtgtattttagtttttattaggttacggattggtagtgtttagtggtttagaggttgggggatttttgttataaggaataagtatttatatagagtttattatgtattagatatttatgagtatttttgtaatttagtttttataataattttaagaggtaggtatttattattattttatatatgaggaaatagatatttagtaatagttttatagttgtttagttttttttttttatttttttttaattttttgtttagttattgaggtttgttgagtttttttttgtttttttttttagtgttttttattagtttggatttttatacgattttgttattagtttatgttttttagttatattgtgttgttttagggtttattatttatttttttttttatgttttgttttatttttattatattagtgaagatttttttttttgggttattattagatttgttatttgtagtgaggttttattttaattaaggaggttaaaataagaataattttttatgtgagtaagaggaatttattatttttgttaagttttttaattaattttaaattttaagtatttttgtgtttttgtatagtacgtgaatatttttatataataaaatattttttttatttttttgttaaatgaggatattgtttattttgttagataagttaatgtttgatttgagattgaaggagaaaagggatttattttttagcgataagtatttttgttggtgtttgataaataaaaaaagagtagtttttttattagttgttattgttagattttatggagttagttgttattttaattgttgagattatgagaaggtaatattggttaattgatgaatattttttttttttttgtttttgtagaagatgtgttggaattggtttttttatgaaggtaggttgtagagataatgatagtttttttaagaaagatagttattattttgtttttttgtatggttttgttttttatttagagtttttgtaaaaaaaaaaaaaaaaaaagagatattttgtagttttatttatcgattttttttttttttttaaaaataatgtttttaaagatagagttttgttttgtagtttaggtttgagtatagtggtataattttggtttattgtaatttttgttttttaggtttaagtagttttcgtgttttagttttttaagtagttggagattataggtgtgtattatcgtatttagataatttttgtatgtttagtagagatggggtttttttatgttggttagtttggtttcgaatttttgattttaagtgattcgatttattcgtaattgtttttttaaatgttgggattataggtatgagttattatgttttatttaaaaataattgttttaaagtagtttttaaggttttttaagtttatttatatttttttaatttttaagtaattttaggtaagtggaagttgaaaagttataaaatgatagttataagggttaagtagttttgtatttttgttagagtgaaattttattttttttgatgtaaaataaaatgatgtttgtttttttagatttatggttattatgatatattattttgtatttttgatttaagaaagtattggtattgtttaatttttgtgttttttgattgttatgttaagttttaggttgtatattttgttttttgtaaggaattttttttatttggtttttaattttttgatgtttggtttgtgatttggtgttgaaattggttatgatattgtgtttagatttttttttaaaattttgtattttgttttggatttgtttttaattataataatataatttattgatttattgtttttaaatttatttttgttatttaggttgatttttagtgattttatgtttttttattattgtttttggttttgtaaatagattttatagagtttcgtaattatttaattaattatttggttagggagtaaggtaagagataaaaattgagggaaggagagaatgatgagtaattgagggagtagtttggggttgaaaagttattttagaaagtagttttgtgattgggaggaaggtggttgatgttattgtagggggtattaaaagtatttgttttgaattttagagttaggtagaaaataaaatagaaagaattttttttttttttgagtttggggaaattgagagagaaggagaaagttaaggaaagggaattgatatttattgagtcgttgttatttgttaggtgtatattgatgggtattttttatagttattttttttggtttatatgacgtttttattatatatatgttattatttttattttagagaggaggaaattttaagttaatgtgtataagattatagagttagtgagataagataaggttaattttaaagtttatatttttatatattaaatatttttagttatattttagatataagtaaataaggaatttagaagtaaaatttagtaaaaatttttagatattgttaattttattaatttgagttaaagaatgaggttagagatgaatatatatatatatgtatgtatatatatatatatagttatatatatattttaatttttttagaattttattttatttatttatttatttatttatttattttgagatatagttttgttttgtcgtttaggtcggagtgtagtggtacgatttcggtttattgtaatttttattttttgggtttaagtaatttttttgttttagttttttaagtagttgggattataggtatttgttattatgttggattaatttttgtatttttagtagagacgggttttcgttatgttggttaggttggttttaaatttttggttttaagcgattcgtttatttcggttttttaaagtgttgggattataggtatgatttattaggtcgagtttagaattttatttttattatttttatttcgatagttttaggagtataggtggtttttatttatatggatgaattgtatagtggtgaagttcgggtttttagtgtatttattatttaatagtgtatattgtatttagtaaataattttttattttttattttatattttattttttatttttgtgtttttagtgttcgttatattattttgtatggttttgtatatttatagtttagtttttatttataagtgagtgttaaattaggtttagtttaaagttgtttttttatatgttttaagtttagtttaaaggtttttttatatatagtaaattgaaatttaatttgatgtgtaattagattgaaatttattttagtgttaattattgagttttggttaattaaaggtgattaattgtttaaattgtgtttaaataaataaatgttaagttttaattaattttgttgtttttgtattttatgtttgttttttgtatattattttattttttttgtttataaatattttattatttggttgttttggagttttttagtttattttggtttagaaggttttttaatttataaattgttttttgtttaattaaattttgttgaattttattcgtttaaggttttttttttttaataatgagaatacgtagtatttggttttttgtttttgagttattttatttaggaaaatggtttagttttatttaagttgttggaaaatatattattttatttttttttatggatgagtacgattttatggtatatatatattatatttttttatttatttattagtttatgggtatttaggttgattttatatttttgtaattgtgaattttatgtttttttgatgtaatgatttttttttttttgggtagatatttaggagtgggattgttagattaaatggtagatttatttttagttttttgagaaatttttatagtgttttttatagaggttgtattaatttatatttttattagtaatgtataagttatttttttttattgtatttttgttaatatttattgttttttgattttttaatattaatgatattggttgggataaggtagtattttattgtggttttaatttgtatttttaggttgggcgcgatggtttacgtttgtaattttagtattttgggaggttgaggtgggagttcgagattagtttgattaatatggagaaattttatttttattaaaaatataaaattagttgggtatggtggcgtatgtttgtaattttagttattcgggaggttgaggtaggagaattatttgaatttaggaggcggaggttgtagtgagttaagatcgtattattgcgttttagtttgggtaataagagcgaaattttgttttaaaaaaaaaaaaaaaaaaaattgtatttttttgatgatagtgatgttgaatatttttatatatgtttttggatatttgtatatttttttttgagaaatgtttgttaatgtcgtttgtttattttttaatgggattattatttggtttttttttttttttttatttgtttgagttttttttagattttggatattagttttttgttagatatttgtaaatatttttttttattttgtggttgtttgtttaatttttgattattttttttgttgtgtagaagttttttagtttaattaggtaggttttatttatttatttttgtttttgttggatttgtttttgaggttttatttataaattttttgtttaggttaatatttataagagtttttttaaggttttttttagaatttttatgattataggttttagatttaagtcgttaatttattttgagttaattttcgtatatgttgagaaatagggatttggtttcgttttattatttttatttttatttttttttgagatggagttttgtttgttatttaggttagagtgtaatggtacggtttcggtttattgtaatttttattttttgggtttaagtgatttttttgttttagttttttaagtagttaggattataggtgtacgttattatttttggtaaaattttgtattttttagtagagatagggttttattatgttggttaggttgattttaaattttcgattttatgatttatttatttcggttttttaaaatgttgggattataggcgtgagttattacgttcggttttagtttcgtttttttatttgtgttaatttaatttttttagtattatttattgaatagggtgttttttttttagtgtattgttttgtttgtttcgttgaagattagttggttgtaggtatttggttttatttttgggttttttattttgttttattgatttattgtgtatttttatatcggtattatgttgttttggttattttagttttgtagtgtaatttgaagttgggtaatgtgatgtttttagatttattttttttgtttaggattgttttggttatttaggttttttttttattgttgttttataggaattttaggattgttttttttaattttgtgaaaaatgatgttgatattttgataggaattgtattaaatttgtagattgttttgggtagtatggttattttttatattgatttttttaatttatgagtatggtatggttttttatttgtttgtgttatttatgattttttttattagtgttttgtagtttttattagggagattttttatttttttggttaagtatatttttagatatttataattttttttgtagttattgtaagtgagattgagtttttgatttgattgtttggttggtcgttattggtatagagttgtgttattgatttgtgtatgttgattttgtaatttgagattttattgaatttatttattaaatttaagagttttttggaggagtttttagcgttttttaggtataagattatgttattggtaaatagagataatttgatttttttttttttaatttgggtgtgtttttttttgtttgttttttttggttaggatttttagtattatgatgaataggagtggtgaaggtgggtatttttgttttgtttagtttttagggggattggataagtttttttggatagtttttgtttttttgtgtgtgtgagacggagttttattttgttatttagattggagtgtagtggtgcgattttagtttattgtaatttttgtattcgaggtttaagtaatttttttgttttagttttttaagtagttgggattataggtatgtagttttattatgtttagttaattttttttttttttttttttttagtagagatgaggttttattattgttgattagattggtgtcgaatttttgattttaggtgaattgtttattttggttttttaaattgttggtattataggcgtgagttattgtgttcggtcggtttttaatttttatttatttagtatgatattggttgtgtgtttattatatttgatttttataattttgaggtttgttttttttatgtttagtttgttgaaattttttattataaagggatattggattttattaaatgttttttatgtattgattgaaatgattatatgatttcgttttaaattttgtttatgtggtgaattatatttattgatttgtatatgttgaattatttttgtttttttatgatgaaatttatttgattatggtgatttattattttgatgtgttgatggatttggtttgttaatattttgttgaagatttttgtatttatgtttattaggaatattgttttgtagtttttttttttgttgtgtttttttttggttttggtattaggtaatattggttttatagaatgagttggggaggatttttttttttttaattttttggaatagttttaataggattggtattagtttttttttgaatatttggtagaatttagttgtgaatttggttttgggttttttttttttttttaaagattttttattattgatttaatattagtatttgttattggtttgtttaggatttttatttgtttttgatttaagtttagagggttgtatgtttttaggagtttatttattttttttaggtttgtttaggatttttatttttttttgatttaagtttagaggaatgtttttaggaatttatttattttttttagattttatagtttgtgtgcgtagaggtgtttatagtatttttagatgattttttgtatttttatagtgttagttgtaatgtttttatttttttttatgtttttaaatgtagtttttatataagatttttgtatattgtagaaaattttattttttttattaagtttaattaatttagtttagttggagaattattaagaagtgtgaagatataaataagaaacgaacgattttattttataaatgtaagtaaaggaaattttagtgatggtttttgttgtacgaagagaaattaggttaagttgaattattaatattcgttttagattgcgtaatttttaaatggtaattatttatatttattatttattttaattatatttttaggtttggtttagatattgggatttttgtgaaggaagagaggtttgagggaattggattgtaggagatggatggtgagaggaaagttgggggtaggggtaggcgtgcgtttgggtttgcgttgattatataagaaggagatttaaaaattataaagattttttaagattttggaaatttagtattttttttatttttatttttttttttttttttttttttgagatggagtttcgttttgtcgtttaggttggagtgtagtggcgggattttagtttattgtaagtttcgtttttcgggtttacgttatttttttgttttagtttttcgagtagttgagattataggcgttcgttattacgttcggttaattttttgtatttttaatagagacggggttttatcgtgttagttaggatggtttcgattttttgatttcgtgattcgttcgtttcggttttttaaagtgttgggattataggcgtgaattattgcgttcggtttatttttattattttttattttttttttttgttttttgattgggattggtaataaaattttaaatatggggaaaataattttttatataatatttttatgttttataattttatataatattttaatgttttataattttttatataatattttaatgttttataaaaataaaattatatgatatttttttaggtgaatttatttttggtgtttttgggatgtttatagataatgttatagtaatttttgattatagattattttttttaaatgatataatattgataaagtaattgtagggtttttaaaataaaatgagttggttttgagtttatggatgagaaatttgttggggaaatggttaaattttatgtatgtatttaatagttatgtagtggaataaaaatttaaaggtattatattatgtttattttattttaattaaaataaaagaataatttatttatattatttatttaaattataaaatattatagaataggttgggagcggtggtttatgtttgtaattttagtattttaggaggttgaggtgggtggattatttgaggttaggagatcgagattagtttggttaatttggtgaaattttgtttttattaaaaatataaaaattagttgggcgtggtcgtgggcgtttgtaattttagttattcgggagattgaggtaggagaattatttgaatttaggaggtggagggtgtagtgagttgagatcgtattattgtattttagtttgggtaatagagcgaaattttgttttaaaaaaaaaaaaaaagttatttaattggtgatatatattaatttgtgagtttaggaatttagtgtttttttttttaattttttgttatttttaagtataataaagtattatatatatatatatatatatatatatatttttttaattgtgaaaatttttaaatttgtagaaaatttgggaaaaataaaataatatttgaaagttgttatggtttgaatgtgttttttaaagttattaggtttttttttttgttagagttaggatatatatattagtaaattattagttaaaattgatatttttagtttaaaatatttttttagtttaaatttaatattattgttttaatttaattacgtttatttgttttttatatattaaaaattttagttttgaattatatgaatataattattgatttgttttattttatatataatataaagttgttatatataaaatattggaaatttaatttttaatgtaataacgttgagaagtgggatttttaaaatacgattaggttattttttaaagagatgggtagagtttttataaagggtttaatgttattatttttagagtggattagttattttattttaggagtgaatttttgatgaaaggatgagtttgatttttttttttttttttattttttttttttttttttttttttttgttttttttttttattatagtaagaaagtttttgttagatgttggtatttgatattaggttttttagtttttagaattgtgagaaataaattttttttttttttttttttttttttttttttttttttttttttggtaaattatttagtttgtggtattttgttatggtaatataaaatggattaagataaatatttattatatagatttaataattgttaagattttgttgtgtttgtttgaattgtgtgtgtattttgaatttatttcgaagtaaattagagatttagtattttatttttaaatattttagtataaagatgatttgatatataatcgtggtattgtaattatattaaataaaattgaaaatagttttttaatattatcgattattagtttatatttaaatttttttatttgtttgaaaagtgtttttatatttgtttttttttaaagatattgttaagaattatttattaaatttgattgtaatgttttttaatttttattattttatttattttttaaatagtatttttttagagagataaggttagtagaattttttatattttgaatttgtgtgattggttttttgtggttttatttgatttatttttttatttaatgtattttttttatagattagaattttttgaaataaaggtttgattagatttagatgaaagatttttgataataattttttataggtattgttgtgtattttgtattttattttattaggaagtatatgtttaatgttttgttttattattggtgaggttaaatttgattatttagtcgaggtgatgatagttattatttttgtaaaggtattttttttatttgataatagtaaataatttatgattatgatattttggtatgatgtgatttttttgttttttattgtttatttttttaatggttttaatatatatgatgttttttttgaattaatgattatattaggtttataaaatgttggttttttaattttgttattttttttaatatttatttattggtattttgaagggtagatttttttttattagtggaatatttttttgtgaaatgttaggatatatatttgttttttttaagtattaattttttgtgttatgaattggaagattatatttagtggtaatattaatgggttgttgttgttttttttttaaaatttgtattcgattattaataggaatttatggatttttatatatttaatgtgtttaattatattatagttatttttttgatgtttgagttgttttagttttggttaatggaagtttttttaaattggttgatttgtttttttgatatgattttattagtttttgaatagtgttttgttttatgaaaataatgagatatttatatttgttttgtattttttataatttaggtttggaattggttatttttttaagaagttttattttttttgagtgggaaatgatatttatatattataatttgtgtattgaggatgtttattgttatagggttattattaggtttttttatttgttagagtagggatatatatgttagtgaattattagttaaaattgatagttttagtttaaatattttttttaatattattattttaatttagttatttttatttgttttttatatatgaaaattttagttttttttttttttttttttttttttgagatggagtttttttttgttgtttaggttggagtgtaatggtgtaattttcgttgattttaatttttgttttttaggtttaaataatttttttgttttagtcgttcgagtatttgggataataggcgttcgttattatatttagttgattttttgtgtgtttttagtagagacggggttttattgtgttggttaggttggttttgaatgtttgattttgtgattcgttcgttttggttttttaaaatgttgggattatagggatgagttattgttttcggtttaaaaattttagtttttaattatattaatataattattgatttgttttattttatatatagtatagttttaaataaggatataaatattatttaattataaaataattgaatgatgtttaaagttttgatagttttttttgtttttagaatatattttattaagttagttggggtaatataatgagattttatttttatttaaaatatgtattttaattaattgggtatggtggtatgtttttgaagttttagttattgtatttgggagatcgaggtgggaggattacgtgagtttaggaatttgagggtgtattgagttataattatattagcgtattttagtattttagttttggttggtaatagagtaagattttgtttaaaaaaataataaataataaataataataataataaaaaatagagagagaagagagagagtaagtgtattttattaagaatatatagtagtattttttaatattatttgggatatttattttttttgtgtggtttagttttatttgttttaaattttagaggtttttgttaattttttattaatattgtaaattatttatacgttttaaaggttaatatttattttttatttttattttttttttttttttaaaagtagttatttttattaattttttgtttatttttttaatgtagtttttttttttttttggagatatggttttattttgttgtttaagttggagtgtagtggtattattataatttattatagtttcgaatttttaggtttaaatgatttttttgttttagcgttttgagtagttaggattatagggggtattattatgtttggttaatttttttattttatgtagagatagagttttgttatgttggttaggttggtgttaaatttttgattttaagtgatttttttattttatttttttaaagtgtggggattataggtataagttattatatttgatttaatttatttttttgaaaaaatatgtatttttttttttttttattttaaaggtagtatatagtttaattattgtattgtattgtgaattttttattttaatttagagattttttcgtattagtttaaagagattttttttattttttttcgttagatttttttttttaattgatatatgatattttatatattttatttatgaggtatatgtgagtatttgttatatgtatataatgagattaatgattaagttaggtatttggggtattttttattttgagtatttattatttttatgtgttggtaatattttaagtttttttttttagttattttgaaatatattatatatatatatatatatatatatatatatatatatatatatatatatattgttgttgattatagttattttagtttgttattaaatattggaatttattttttttatttttttattttttttaatagttttgtattattttattgtgtagatgtattataatttttttaattattgtatttttattaggtatgtttttaataatttttaattgttataaataatgatatattatttttaaaaggtagattattatataataaagatatatattttattttgggaggttaaggcggacggattataaggttaggagttcgagattagtttggttaatatggtgaaattttatttttattaaaaatataaaaattagttgggtgcggtggtgaatgtttgtagttttagttgttcggtaggttgaggtaggagaattatttgaatttagtaggcggaggttgtagtgagttgagatggtattattgtattttagtttgggtaatagagtaagattttgttttaaaaaaaataaaaaataaaaagatatatatttaagtttggtatttttttatatgtattaaaatatgttttaatagaaaaatattatttttattgatttgtttttggttaggttattaatatttttttaaatatttcggttttatgtaataatttaggaaatatttggtgtgttttttagtgaatgtggagatattggatttgataaatattagttggttagattagtgtttggtatattggaagtgtttaataataatagttaatattattatgaaagataatagtattaataaaataatatttgttaatattagaaaaataaattttaatttatttttttttatgcggatatgttattagggaatttgagagtagggtgattatattttgttttagttagttggggttttaaatatttattgagtaattattatgttttaggtattatagtaagaatttgtatttgaagtagatttatatattgaaggttcgaggaaaggaataaagggtaattgggaatttgattaggttttaagagcggtgttgggattttagggaggaggtagtagaacgtttttagtggacggaagtgtcggggagtttattttgggagattttaggtttatttagatttggaggttttaggtggggtggatgtaaattataagatggagttaaattataagttataggtagtaattttttaaattataaggaggagaggagaggaagtgaagtcgtttttttgcgtgtacgattatttgtttggaagtttttttgaagttagagagaaaggaaagtttgagaagtgggatattatttattgaaaggtatttgtgtgtagagataaatagggtaatatgatagggagagattggagataggtggtttatttagtaaagttggttaatgaagtttttttgaattggtgttatacgagttgtgaatgggtgatgaattggaggtattaatgttaaggagaattttggggaagatagtgtggttattgtttaatgaaagaaggaagagtagagggaagtaaagatgaagatatatgtagcgttagattatatagagttttgttgattaggagggaatttagattaagtaagaaagaaagtttgaattgggggagtgtttcgattgaatttaggagggagaagaaaatttttttagtaattttatttttagttattttttaagtttattttattttttgtagtttgttgttgttgaagttttagaagaagtttgtttttaaagttgggaatatttttttttatatattttttagtaatgttgatgtttgattttgtttattttgttttatgttttataagttggtttttattcgttgttgagtaggatagtgtagtggaaagaatatgggttttagtattatatagattttttaattattttttagttgtttgattttgggtaagttaggtaatttgaattttagtttttttttttataaaatgaaattattatatttaatttgtagattggttataaggaagaaatgaaataatttatgtatggtagaatgatgttttttttttttttttgtttgtatttaggtttgttatataagataatagtatatgttatcgttaaggtttttttttttttggttttggattttttaaaatttgaagtttatttgatattatgttaggtgttttagatattgtgttagagagagagaggggaatgtttttgataggtaaagggggaaggtttttttaaattgaggaaggtatagtggtttgtgggtttgaaagagttttgtttttttgtagtagttaaggtaggtggggaggttttttagggacggggaagttggtcgtatggtgtatttttgtagttttgtttttaggtattggggattattttttattaaagatttttttgttttaagtttagtgtagaagtagtagagtttttatttggaaaagagtatataggttaagttttaggtatgtttggagtaaatagtttggattggagaagataataggggtttttttaaggttttagtattgtgttagggcgtagatttttggaataattgtaagagattagaagttttaataaagatagattgaatttaaaattagttttatggtaggggttttgaattagatttaagattttttaaagagtaggttttgaattagattttcgattatttaaagatatttattattttttgtattttgtgtattattttattaattttttggattaagatttaaatttattatacgtgaaaagtattaaggttaggtatattgtatgtgttgggtaaacggtagttaatgttattaaaattagttgtagatagtcggattaggttggatttgaagtaaataaaattgaattaaatagaattttatagtgttttaatgtttattatgttttgggtgttggaattataagatatagtttttttttgttttagaggagtagttagtggtaaaggtaaatttatatatagttaattgatatagggcggaatgtggtatgtattgtagggatagggtggttagtatattgggggttgggattgaaaatgttttatagaagaggtgatatttaatttggattttggaaggataggtagaattttgattggttggtggaggaaggtaggtttagtatagagaatagtttgtgtaaaggtagggaggagtaaatatgcgataatagttttttgtgatttaagtattgattatttttaggaggagttattatatggttaaaataggttaggtgcggtggtttatgtttgtaattttagtattttgggaggttaaggtaggcggagtatttgaggttagaagttcgagattagtttggttaatatggtgaaattcggtttttattaaaaataataaaattagtcgggtatggtggggggtgtttgtaattttagttatttaggagggtgaggtaggagaattgtttgaatttgggagatagaggttgtagtgagttgagattgtattattgtattttagtttgggtaatagagtgagattttattttaaaaaaaaaaaaaagaaaagaaaaaaagaaaaagaaatattttgaggacggtttgagaagggtttttattttgtaggtaatggagtatttataagaatttaaaggaggaagggaaaaagtagatattttataagtttttgagagaaaaaaataataacgattacgtataaagttttatgatataatattttttggattattaataataacgtaggaagttaagggattatagagaaatgttttaaaaattttgatggaaatgatttttaattttgaattttataatcgtggaagttattatttaagtgtgagagtagaataaatatatttttcgatatacgaagtataaaaagttttttttatatgtattgttttttaggaagtggaaagaagaggtgttttattaaaataaggtagattataaaagggtaatgattggatataagaagtagaagatttaattcggaggataggtaaattttgacgaggatggcgaagagtgattttagagtgatcgttgtattattaagggtaaggagttaagaatggagtagatagaaggttttgggagagttatatttggtgataaaattgatagaatatttgatgtgtttgattgtattgtgaggaattttgtgatttattaataataagtataaatatagttatataaaggaaaataggataattatatattttagagaaaacgaagtcgtttagaaaaggaagagtgagtatggtttgttttatggtttgttattatatggttatattgatagaaatatagtaaatatagtaatttttattatattgtaaaaattataatatagttatattaaaagaaagggtatgggaaagggggtatgatgttttttgaggatgaaaaaaatttaaattttttttttttatagtaggaggtaaagagataaagtttaaagttgaaaaatttagatgtagtaatataaatatgttatttagagatgggaggttaatattaataaaatatattagaataattgaaagttattttttgtaagggtgaggatatggtgggagatggggttggaaattggtatttttgtagtaaatattgtagaaatatttgattttttaaattataatataatttggttaaaaattaaaatcgaaagagagtggatgggaagaggggatttggaggtagtttacgtagatatttttagagagcgtgattaggagtttgggtggaagggagattgggttaaggatagatagaggatttgatgtttttgttatataggagagatgatatgtttatgatttgtagggtgattttgtaaaaagggagagtttggatataaaggataggagattattggatgtttgttttaaaagagagtgaaagattaagaatgtaggaggataatttgttttttaaaataaaagattacgtattttgagattagaaataaatgtgagtatatacgtaggtgtataaatttaaaagttttggaattatttttagaagttttagtgattttagggtagtatatgtaatagtaaaaaaaaagtatatttttttagttaaaagaatataattttaatgattttattaagttttaggatagagatgagagaaatatttttttaatgatgtattaagttaacgtttaagtaaaagattagtagagattagagattgttgggtatatacgtattttgtgatgttttttgagaattaatttatttttttttttttgagaagaatttgatttttcgtttcggggttgagtgtttggtagttatatttgtgttgagattttgatttttgttttaattatatagggttgggatggatatttgttttaagtttggttagttatttatttttttagtaatttaaagttgtgattaggagatatagtttttgtgggttgtgagggttgagatgatataaatttaggagttgtcgggtggatatgtttattgagaaggatagttagtttatagagagagaatatcgttaatatgtaggggggtttagagaatatagattatgtggattcgagagtgttggaggggtagttttagtttttttgggtttttcggattcgagttttgtttttgggaggtttggttaaaatttatttttgggttttgtatttttttttatggttatattgtaaatattttatattttgtatgtgattatataaagagggtttttgttattggtatataaaaagtttgtttgagatgatttttttttatttttattagggttttttggttattgattttaatttatttttttttaagaagtttattgagtttttataattttttggttttttttttttttaggattaattgtttatagtttaaatttttattttgtttttatttatttgtattttgattggttgatgttttaatagatttaggttttttagaaagtttttttagtttattttagattttggggattttttttttttatgattttcgatggtatttgattacgttattgggttttagttattagattatagttaaggtttaggatggttgtattagagttatttagagtcggttaaaaatgatagtttcggttgggtatagtggttaatgtttgtaattttagtattttgggagggaaggtgggtggattacgaggttaagagatggaggttattttggttaatatgatgaaatttcgtttttatttaaaatataaaaattagttgagtgtagtggcgtatatttgtagttttagttatttaggaggttgaggtaggagaatggtttgaatttaggaggtggaggttgtagtgagttgagattatgttatggtattttagtttggtgatagagtgagatttttttttagaaaagatagtttttttgttgttgttttttgtattttcgagattttaatttagtaggtttgggtgatgattgttatttttatattttatttatttatttatttagagatagggttttattttgttatttaggttggagtgtagtggcgtaattttggtttattgtagttttgaatttttgggtttaagtattttttcggttttagtttttttagtggttgggaatataggtgcgagttattatgtttggttaatttttaaatttttttttgtagagatggggtttttttatgtagtttaagatggtttttattttttggttttaagtagttttgtttttttggttttttaaagtgttgggattataggaatgagttattgtattaggttaatgtttgtatttttaaaaggattttaagtagtttttatgtgtattttggtttgaaaatcgtaatttgtattgtttattttggttttgatataaattatgtggtatggtgatttatttttttgtatgttttaaattttgtttatagaaaagtagattaaaattttttaggttatatatttagagtgtgtttaggtggatttttttttttacgagatattttgtagatcgattttattattttttatttaatatgattgattttattgagggaagtggttattttatttaagttttgggtttttttttattatgtatgggattttagggaaagtagaaaaaggagataatattatggtaggatattagtggtttttttatatagagtaaatttaggtaggagtggagtttttatgagtttgttttgttttagtattttttagaattgttgttagttgagggggtcgtgaggaataggataatttgtattttttttagggtaaatttgaatttaggaggtaaattttatgaagtttatgtgaaatggtttatttataaagtaatatataatgggttaaatggagtaagatatatttgtgtgggttttaggacggttgttaatttttagtattatatgttttatttttggaagaattggttaaggtttggaaaggatatagtgtaaatattattaaagtatttagtgttgttagttagagttttgggtagagtaagaatgtgtgtttgtgttgaatgggaagggaagttagtaggtgtttaataaattttgttatgaatattggggttaaaaaagaggggattcgtaggatagatgttgattttatttaaagttagtatagcgggatgtatttaaagggtattgagtacgtaggggttgttataaatttatgaggatttgtagggtgttttttataagttattttttttagaaggattattatttaaaatagtagaaaatatacgatcgaggttgtttaattttaatatgttgggattttatttttgagtgtttattttttttaaaattttatttttttattttatttttgttttttttttttttgtttattttttttttgatttttttttttataatagaatttttgattttttatttacgttttgtttagagttatttattttttttttttattttttagattttcggggtttttgtatttggggatattggatatatatgtgtttatgatgatgaggacggtgtttacgaggaagtttattaggtcgatggttagatttagggtatagattagggtttttatggtatttggtggtggaataggtatttggagttttaggagagaaaggaaggagtcggtggtatatgaaaggattttagagtaaaggaaatttggggttaggagggtgtatggggagggggtttcgtattttaatgtttgaggagtggcgtatttaggttttagtgttttatttggtagttatagacgttttcggttgagggtacgaagggtaggtagtggaatttgcggaataaatggttaggttgggaatagaagttggtttgggttatttttttagtgatagtttggtcgttgcgtagttaggtgatattgattataggggggaagatgttgtttacgatgtagatgaggatgttgggttggtttagttttattcgagatttggggagtacggttattcgtggaggtattaggaggaacgggttttgagtttataggtttattttttattttagggttttattaggattgggattaagggacgttttttttttgtagttatttgtgggtaggggatgttttggggtatttattggggtaggagaggagggaaatagagggagaggagattggggagggagtggggacgttaggagtttttatatttgattggtttttgggcgggagttcgggtgagaggtgttattttttaaggagaggggtgttaaaggggtttgggaagatttggagttttttgggaaagaaaggaatagggtatgataggcgcgggcgttgagagcgcgttttagagtgatgggaatttaggaattgggaggaagtttttttggattttttcgtttgattgggtgggtagagggagggtcggtatcgttgatggttttgttgcggttggagcgttttattaggatgtttagatgggttttgattgcggcgatgtcggttagtttattttgcgggttaaagcgggtaaagttattaaatttaggtagacgttatacggtttcgtttttttttaggtttatagagaatagttgttttttattaaatttatgggtgaattggttcgaggcgtcgtaagattggtagaaggcgggttcgtaggagtttatgtggttagttgtgtttggcgagtttagggttaaggagagagaaaaaaatgtgtttgttttatttataatatgtgattgttgagtttttgagtttgggtttcgttttgggttttgtgtggggatagagttttgttttgatattgggttggttttgggagagagaaagggagagagaataggaagaaagaggtttattttagtatattgtagtcggtatagagatagtgtagtttggtatattaggatgggaagaggagggattgtttaaaattatgtttggggttttagaatttaaattttggttgtggttatttgttttggttgtgttgttaggttttgtgttgtgagttggtgggattgtgggggtgggatgaggaggaatgattaaggataggagagtatggagttttgtatagagatgtagtgtaggtgggtgtgaggggaaataggttacggttggtaggggtaagaattaaggttagtgatttagagattaaggggatagggagaggtaatttaaggtattataaagagtattggacgaggagttagaagttaaggtttatgttttaatttttttattttagagtattatgattgagtgtggtttttttataattgttgtttagttttttggaagttagggattaagttttaatttttgtagaattttatgaagttgtttgagtaatagttattgaggaattagtatgtatttagtataatggggggttagggaaataaaagaaaaaaaagatgaattatttgtagattcgtattttagtttatgtttttcgaagaataaagataggtaaatagttaattatcggtatgggtataaatattgtaatagaattggatttgatcgggtatattttaggttaggggtggtagagaaattagggtgtttgttggtatttgttgggtggaggtttgggttttaggaaggaggaaggaatgaggagaaatttgaacgttagtaaaggttgattggggtatttgcgtagttgatcgagttgtatttttatttaggtttagagtggatgtgatagagatgagggggattgggtgttttttggtgaaggaagttgtttataaattagagagcgagaggaataagtattttttatgttatttttttatgtaatttaatttcgtaaatttttgtttttcgtcgtatttttttcgttttcgtatttatttttggtggtttttgttttttgcgggtttaggagggttattagggtgtggaattttaggattagttttgttttgagggttattatattttggtgttttaattaaattagttttagttcgtgtggtgaggataggaataaggcggaggtaaagaagaagaaaatagattcgaggatgggggcgattttttttgtttttagttaattatagaaattttttgagtgaatgtatttgttgttgggtaaagagggaaagagtcggggtgagaaggtggaaggatttattgggtttttaggagaggttaaaggaagttttggaggatgggaggggtttggattaattattattacgttttttaagaagggattttttgaagagagagaaaaggtcgttagagtatcgcgtagttgagttttaataaattttttttttatgtttatttgcgatgtagggaattttatttttttaagaagttttcgtggataaattttgagttagaaagtaaaataaattttattaataatttttaaaaggaaaatattggttatataatggaataaaaattttttaaaattttaaattatttttaaaaatgttattttattttttttttattattatttaattttattgtgtaagaaaaaatgtgtaattgttggagttgtttggtttaaagtaaagtgtaaagagttttcgtggatttttcgaggagggtagaggtgttggttttttttgttggtttttttaggattcgggtattttttttaggttgatataggttggaggacggtattatttttgtttttggtttttggttgggttcggttaataagaggtattgggagaatttagtttagtatatatatttaaaaaataaaataaaataaaataataataacgtaaagttaacgtttgtgtaaagagaaatttaattaaattaggttatgtgttaaagattatgaaatcgatgatttttaatttggagggagttaggaaattatgcgggtttttggttttaaatgagaattatttggggggttcgttataatacgtgtttttgagttttttttttatttaatgggttagattagtttttttaaggtagggttagggaatttgtgtttttagtatgttttttaggtggttttcgggtagtttgtggattggtaaaatttgttttaatgttttttttttaatgaataagggatgtttattttaagtggggtagatatagtttttgattttaaattaattaaatgatagttagtaattgatttgtatggttcggtttatggggagttttaattttagttttttcgtttttagtttatagtgtttacgtaatgtttagtatattataggcgtttaggagatatttgcgtatgaatgaatagtgtttttattgttttggttttgttttggttaggatttttgttatttttatttttttttaagtgaggtgggagttggagttatgagatgaaagacgggaaagttatgaaaaatttatgataaagaatgttgtttttttggttaataatagtcgagtatcgggtgtttttttttatttgaaaatatatatagattttttaaagtatgttttttgttattaatttataatttaattatatgataattttttatggtttggagtgtggtgaatttttgtaaatattttatatgggttttaataaatgtgatgtagaattttatatatgtatatgtttattggattaagtatgtggattttgttattttaatttattacggttttttttatttttggattggtttatatataattaagagtggtgtatttatttatttattttttagagatagggttttgttttgttgtttaggttggagggtagtgaagtaattatggttcgttgtagttttaaatagttgggtttaagcgatttttttgttttagttttttagagtagttgggattataggtatgttttataatttttggtttatgaatggtatatttaaatttttaattgtgattgtaggttttttaatttgtttttaatttttaaattaatttttgttttttttgtatttaggttattaaggtgtttatttttgggaattattatagttttggtgaattgagtttttttttaatttgttttgagaatttttttgttttattttgttttgtttgatagtaataagttttatagttgtttttgggtatttgtttattgtatttttttttatttttttgtttttattttttttttgtatttatgttttagatgtagtttttgaaatgttataaatatagatttttgtttttgatttaatttgacgatttttgttttttaatttatgtttaatttatatggtagttaaagtgagtaaatttgtttttgtaagagataaatattgaagttttagtggtttaataaaatataggtttattttttagttacgtgtagtttaaggtaggttgggtattttgtagtttttttttaaaatatgttttaaggtggttaagttttattttgtatttttattattgaaaagtattttatgaatttttagttttgtaggtaggagagagaatttgggaaaggtatattgtttttatggttttggattagaaattatttgttatttttgtttatattttattggtaagaagtaaataatgattttatataggcgtacggggatggaaaaatgtacgttatttatgtgtgtaggaagatataatggtttggtgagtatatggttttgtttttgttgtattttgattgtgtttattgtgaatattgatgtatttgggtttgtttgtaatattttatttattttaatatttttattttttaaagtttttttgtttgtttgtttgtttgtttttgagacggagtttcgttttgttgttaggttggagtgtagtggtatgatttgggttggtttattgtaatttttgtttttcgggtttaagcgattttttttagtttttcgagtggttgggattttaggtgtatgttattatgtttggttatttttttttttttttttttgtattttagtagagacggggttttatcgtgttgtttaggtttatttttttgagtttaggtaatttgtttggttcggttttataaattgttaggattataggcgtgagttattatattcggttaagtttttttttttaatttttattgttttttttttttttaagtgttatcgatattttttttattttttttttgattggataagaattttagtatgtttttaaatttatttatatatttttttttttattaaattatttggttaatattattttttatattttttggtattttttagaatgcgttttttgattagaattttttttttaaaattttttagatgtgggaatttgtatagtaaattttttaaagttttgtatgtttgataattttttaaaattatattagtatttttgaataaagtttagttgtgtattatatattatttgaagtatttttttttttaatattttaaataatattattttaaatttttttttttgtatttaatgttatagttagaaaattttatgttagttttttatgttggaattttttagaatttttttattgtttttgatatttttaaattttgttagtgtgtttagagtgggtttttttttttttttgtaagatattatggattttttttattttttaattttgggaatttatttttttatttttttaattattttttttttttattttttgtttttgtgaaatttatataatttatatttggataattttttttttttttttttttgatttttttattgatgattttttaattttttttttttttgttttgaattagttttttagtgtagttttttatttttttgttttgttttttagttgtattttttttattatttattttattaatgtggtttttattttgattattatatatattttttatatttagaatttttaggtgttttttttatattttttatttttttatattataatagtttttgatttttaaagtgtatttttaatgtttattttaagcggttggtttatattttttattattttttttaaggatatagatggttttgtttgttgttttttttttgaggtgtcggtattttttaaaggtattattttgatttattagtggttatttgtgttggtgttatgtgtgtaaagagaaaggagggttagttggagttttaggttagcgtaaaattatagttattattttttgggtgttattttaggttaggattttagggtgggagtattaggaggcgtagggagtattgatagttggggtggtagaggaggtaatgattagggtagtttttagttttttttattttagtaggattttagtttggatttttttatttattttttaatagttggataggtaattaggattttgttatcgttttttgtagtagggagtaggtagtgattgtttaaggttaatatcggggaggtaagagtagaaggttttaggaatttttttatagttatagttagtaagtaatttagtttagaatattttttagttttattagggtttttttattatttgtttttttggaatgtatatgtatggtttatatttttttttagatggaaagggtttgtaagaagggattatggatgattgaatttttgttatataattttttttttttttttaaacgttagtacgttattaaataaataagttaatgataataaataaaagtgaataaagtggataattttgattttagggagaggtattgttattgggattagagtttaataatgaggtaaatatagattcgataaaaatttattaaagtgttttttaaaaatgatataaatttagttgttttaaattgtttaaaatgttgattttgaggtaaagttgtatttgttatgttttttggagtatgataagtttaggtaggtgttgggggatattttttattaaatatatgtttataggatatttgatgtgatttaggtattgtgtgttgttttgggagtatagaagagtaggatatgatttttttttttaaggattgtgttgttttgtgtagtagttataagttatttgtagttattaagttaaaaaaaattttaagtataaaatgttttgggatttgaagatttaattaaatgtatatatataattttagtaatttttatattaattaatgtttagtttgtaattttttgtatatttgcggtttaaaatatgtattagattaattttatttgttttttatttttttttaaatgtagttattagaaaatttgaaattgaattaagaggtttttattatatttttattggatagcgttgttttgggtgtttttggttggttattagttggttattggttttttttttgagatttttatatttaagtagttagtttgttagagtttttaagtttttttttgttattatttagatattttattagagggcgattttattattgaatttttttattttggattttagatttgattgtttgttggtgtatcgttttgttttaatttattttgttttaagtgtcgtgttaggttttgggattataattatggtttttgttaataagaatggttgttttggaagtttgtatatagaattaaatacgtggtggaaaaaggagaaggtttattaatgtgtaatataaatgtttatgtggtttgtaattttttggggtaattttttttttagtaattaagtagttttaagtgtttgtttaattgtaggaatttaaatggtttattgttgttattagaatgtttgataatttttggatagagaagtgatgtaaatgtgtgtttacgtatggagttgatggtattttttgtattagttttttgttttgggtagattgttgtggttatttgggggtagttttttagtatagtagattttttgttggttattattttttaaattttggatttttgttttttggttgggaattgtttattttttttagaatttttttttttcgttttttgatttttttaaatgttagagttttaatttttgttttttgggaaattttaagttaaaattattttttttttatatttgtagatagtttgaaatttatatattaaaaaaagtaattttaaaaatatataattggttttattatattttggagtaataattttaaatgatggtaggaaaattttaaaattggttatcgaaaggtatagatatagttttttttgtttaaaagaggtatttttgaaaaattttaaatgttttttgggaaaggtataattttttacggttttttttttttttttttttttttttttttttgggaatgatattttggggtagaggatgaatttatagagcgtgttggttgtgggaagttgggtttaggtggtatttttttttttttttgatggttttttgtttttagttttttggtttgtttttatcgttcgttaatattttcgtggttggtttaatttgcgatcgattatttttgacgaaggtagtggggtttagttattttgtttgttggtggttttagcgtggttttgttattatttatatttttttagtttggcgaggttgtagtttgattttgggttcgtgtgttttgggttgtggtttttggttttaggttagtttaagtttttttatgattattttgaatattaatttattgtacgttaatttattaaaattaatttattaattaattagaaattaatatattaaattattaattttttaattttattaatttgttaaaaatttgattttaaagttttgtttttttatattgaatttaatggtttttataatttttgaagatttttgaaaatgttggttaatttgtttttttttttgtttttatagtagtttataagtaatattcgatttgttagatgttggtgatatagggagaagatgataatggtgatagagtgttttttatttttttaagtgtttttataaaaatagagagtgtaattgggatagtaaaggaaaatatttataggtagtgtttttttattagattagggatatttttagaagatttcgtgagattttagaatgtgtgtgggtagatttaagttgtagatttaaggtagattttgtgggttttagtgttatgtggaggtagtagagggttgagaggagagggttttggtgtttttaagattttaggaatatagaagtggttagtgagtgtttattttttaaaagaggtgattttagtttagaatgaatttttagtagagagttttaaggatttagatttttgtaaatttagaaattttttttttttttattaatgtttaatttttaagattatgattttgatatagttgttaatattttgttttggaatattgtttgtttttggttttttgtgataaaaatttaaatttttttttgggtgaataggtataaggttatatttaaagaagtgtaaaaggaaaatattaagatttttagtaaattaatgtttttataataatatatatttttatatgttttatagaaatatgtaatttttgtttatataagttttgggtattttatttataatgaaatggcgtattaacgtgtttttttaaattaaaagttaattttttttttgagattaattatatttttagaatatgaaagtagtttttgatattatgtatttgaaatagtaattttttatgtttgttataataataataaataaattgttgcgtaatatataaaagggaatttttaattttgttttaggtaggagaagttagagagaagatgatatttgaattgtgttttggaggataaatataagtttattgatgcggagaagaggatgagagttttgtaaggagagaagatggtttgggtaaaggtatagaggttttaaagtatatggtgggtaggggattgttgtatggttaagtaaacgaggagtcggaggagacgaggtttaggaaataggttggtgttaaattgtgaaagtcgtagatgttttgttaagtaatagggttgtgttttatttatgattaatggtaagtaggtatagtttttgttttggagttcggtgaaagtaggattgatttgaattgatagaaagagaaaagaggtagtaaattatttaattgattgattgattaattaattaattattcgagtttttttgtgaaagttttaaatttttttattttttttttattttatatttagttttatatagtagtaggaattttttggtttttattttattaagaaaattggttaggtatattttttattagcgatattttgattatttggagattttggtttttttttttttttttttttgaagttttagaggttggggttttttttgttttaggttaattttgatttttagttatgcgttcgagatttttatttttgtttttattgggagtttgttttagttgtttttttttttatttttttgttaattttaattagttttttgttgttagatttttttttttagtttagaatttaggtttaaattttttttgtttttaatgttttttttatttttttagtttttatttttattttttttttttattttttttatgttttttaaagaaaatgttatatttttgtgttttttttttttttttttttatttatttttagttttattgtagtttgatttttttgtttatgattttagtgggatagaaattgattgttaaggttattaaatttttatttttgtggagttttttgttgtttttattatagtagattattttatttttttgaaatttttttttatttagattttaagatattatatttttttgatttttttgatattatttagattatttattttggggtttttgtttttttgggaatttttaaatgtagagtgtttttagggatttgtttttagttaataatgtttttttgattaaatatttatttgtatagttttaatttttagttatttaattatatttaatatagtaaagaataatttttggtatttattaggtgtttagtagttgttatatttttttttttttttagattttttgaatatagtaatttggttttttattaatggagagtaaaatttaattattttattttttttttttttagggttataattttatttttttagatattttttttttttttatattaatttatttttttttttatttttgtatatttattttttttttttggttttttttatttgattaaaatgaaaaattaaaagatattttaatgtttttgtgtaatagttaatttattataaaatatttatatttttagatatgtagttttattatgtaattataaatgttttatacgtttgattttttttaaaattaaaaattagtttttaaaattgttttttatttatatgtggtttttgtttgatgaaaataagtaattagaaaaaattggtttatttttatttaaatagtgtttttaattatgtggtttgttcggttattagattttttttgagaaatattttgttagatataaatgaatatttttagtttatattgtttattggtatacgagggtatgtagagtgttttttatggagaagtaggtgtttatagtagaaatagttttttatgaggttgcgtcggttttgtttttattttttcgttttatgtaaagtggtttagaaaatagtagtttttttttggaattatttttttttttttttagagagttgtattttttgttttttggaaagttttatgaggaaatggattgtttttgtttttggtgaaaattaattttattattaagtttttaattttttttgtttatatagtttttattttaaaagataatttttttgattgggttagaaagttatatgtttgtaaataattagagagaggttaaggaaaaggatagagttggttattgagtttagagggttttgttattaattttatggtaatttattgttagttttttgtaaaagatatatgatttagaggagatttttagatacgaggaaagaggaattttgtaggggatttagaggtaatttttttaattggaggggttaaatagttttttttttatggtttgtagtttagtgtaaggttaggtaagtttttaggaggttatttaggttgtgaggtttttagagaattttagagattatattaaagggttatttttgttttagtaattgagtaggaagtattgttgttattaaattgtataaatttgagaaatttagttaaggagggaagggaggattttggggtttagagttaagtagattattgtttagataggcgatggtaaggataggtagagtttaaagtgttttttgagatagaagtagtattaatggtgtggtgataatttaaggatatgatagaattttaggggataaatatatacggattttagagaaaaattgtatatacggttagcgtggattagttttaaagttaaggggaggtttgatgggattgagatgtttttatgaggttaattcggagtgggattgtttttatttttagaggatttagtaagtaggtttgggtagagagttaggttgggattagttataaaggttttgttaatttgatttgatttagtgttataggaaagtgaaggtaggaaattgatgttaattgattttgggttttttgttttttgttttaaaatagagagttttgggattgaggagggaattatattagtattataaatggtttgaaaggtgtaaaggggaaaatgtgaaaatattttttatatgttatgttaaagtttagtttttttggagtatagcgtgtttgtaaggatatagagggaggttaggttgaggaaagattgtagataattgtaatgttaggtttaggatgtgggattttgtaggtagtggagagatagtgatggtttttgaggaggaagtgagatgattatggttgtgttttaggattattaatttggtattagtgtagtaaataaattcgatttgagggtggtaggaaggttaaagaaaaaataagaatagttttagttaattgttttggagaataatagggtaagtttagaaatgtttaattcgatataataattattataaaaggagttgtatttgtaacgtacgtattattttttaatgtgtttttttatttgttatattatttggtgtttttggtgtgattttttaagtttatttttttttttgattttatttatttaggtttagtttttgggagtgtgtttattgtttttatagtgttttttattattggttttgagttttggagaagatatagggagatgataaaattttagaaataacggaaataatttagggaatggggtggttattatgagaggaataaaagatgtttattgtagatagtatatatggtgtaagtttataattttggaaaaagttagattatattaattttgtttattaaattttgaaatatataatagggagagttttttaaattttgaagatggtaagtttaatataagtagaaaagtagatttttttatattaaggttaataaatttatgggaatttgttagttttaaaagtgaaatgtgtaaatttttaaaatatgtatatatatatatataatttatttatatatatataagggtgatagaaatttgaaggattgttaagagagtttaaggatatttatggtttatttaaatttatgaagtttttgtggaggaaatttgtttttttatattttgtttttgatgaaagagagaaattttatgtttatagtaatatttattaggagtgattttgttttataggggatatttgttaatgtttgtaaatatttttgtttttatattaggagaggggagtattattgatatttggtgggtgtagtttagggatgttggatgttgttaaatattttggaatgcgtaggatagtttttagtataaagaattatttagttttaaatggtaatggtgttaggttgagaaattatggtttagggttatgtttttgttttaaagtgttattgttattgtttgtaagtttaattattttaggagttatatttttgttaaggattgaattttatttttttttataattcgaaatttttatgttgaaattttaatatttaatgtgaatgttttggagatagggtttttaaataggtaattaaggtgaaacgaggttatttaggtggggttttaaggttttttataaggattggtgtttttataagaagaggaagagatattaggagagtaaatgtatagaggttttgtgaggatatagtgagaaggtagttatttttaggttagcgagagaggttttagaatggaatttattttgttggtaatttgattttggatttttagattttgagaaaataagtttaagtttaagttatttagtttgtggtattttgttatggtggttttggttaattaattatttttttttatttatttttagtttttttttatttaataagtttttattgaaaattagatgttggtgtggtttttttgttcgatgtgtatacgtggtttattgtagatggatttatataagtggcgttggaattttgaggggttgaggggatttcgcgtttaggttatttaggtgcggggtgagggggtattttaatttttttggattatatgggttgcggtggtcggtggattagggaggagaggcgcggggagtttgttgtaattttttattagggtaggagggaagatgttttttattttttttagtttattttttggatttaagtttgttagtttttgtcgttgagattaggggatggtattagatagaattttaatttaaaaggaagtagaatttaaagattaagaaaatttttagtttatttatattgtgaaaattaagaaattatgtttaggatagaatattagtggtgtgtttatgtaattatcggatgaggaaattagtatggattaattattttagtggaatttgggtgttatttattaaggtaatgaaagaatgatttaaagatattttagattagggttgttatttttattcgaggtgcggaatataagggtatgagggatagaatgattttaaaggaggggttgtaggtatttgtggggttttagtatttattattatgggttattttgaggttttgttttttatattttattatagggtttttaggttattttaggtatggttttaatagattttggtttagtgagtgttgtgttttgaaaagttgtgcgggtatggtaatttttatttagattttaaaggatgttttggaaagttatagtgcgtaggtagaaagttattatgtgtagggttattatggagagattgtattgcgtaatgtttagtgaagtagtagggtaaggttatttttgaggttttagattaattgaattattggtatataattttagtttgggagagtttcgggtatttagttgttttagaggtagggttattaaagggagtaattatgagggtagggttgtataaagttatgaggtagaggttatttttttagtgtgtttggagggtagaattttgatttaaaaagattattttggaaatttgatttgtttaggatttggtatatttttttttttttttattttttttttttggaataagaatttttattttatgtttgttttattattatattttggaagtaaatagtatattcgattttatagttggagagtaatttgttttataatgaattatattttgagttttatttatatttgatttatttttttaatttttttatgtgtatagtttagttgggtaaataatatttatattgttgtgtgataattttagaatttttttatatgtaaaatgaaattttatttttagggaataattttttatttttcgttttttttagtttttggaaatttttattttgtttttattattttgattttagatattttttataagtgtaattatatagtatttatttttttgtgattggtttattttatttattataatgtttatttatgttgtattatgtaagaggattttttttttttttaaggttgaataatattttattgtatatatatatatatatatatatatattatattttttttatttatttatttgttaataaatttttcggttgtttatatttattgtttattgtaaataatgttgtaatgtatatgaaagtagaaatatttttattaaatgttgattttgttttttttgggtatgtatttagatatggaattgttgaattatgtgataattttatttgtaaattttttaggaaattttatattgttttttatggtggttgtattatttttatttttattaatagtgtattaggattttagtttttgatattttcgttaatatttgttattttttttgttgggttggttttgtagtggttattttaatggttgtgagatatttattttattgtggttttgatttatgtttttcgaataattaatggtgttatatatatttttatatatttgttggttatttgtatatattatttgaagaattatttgtttaagttttttgtttatttttaaattaggttatttgtttttttaattgataaagaaaaattatatatatttattatgtataacgtgatgtttaaaatatgtatgtattgtggaatggttaaattgatttaattaatatatgtattatatatttttatggtgagaatatttaaaatttatttttttagtaatttgtaagaatataatgtattgttattaattatatttattatattgtatattaggttttttgaacgtattttttttatttggttgaaattttgtaatttgggataaatatttttttaattagtagtatttttagtttttaataattattattttatttattatttttattagtttaatttttttggatttatatataaatgagattatgtggtatttgtttttttgtggtatatttatttaatataatgttttttaagtttatttatttttgttgtgagtgataggattttatttttttttaaggtttaatagtatgttattgtgtgtatatattatatttttattatttatttatttgttgatatatatttaggttgtttttatattttagttattgtgaataatgttgtaatgaatatggagtataagtatttttatgaagtgttgattttattttttttgggtgtatgtttagaaatgagattgttggattatatggtagttttatttttaattttttaaggagtttttatattgttttttataatgattatataatttatatttttattaatagtgtataagggtttttttttttttatatttttgttagtatttgttatttgtttttggtaatagttattttaatagttgtgagatggtattttattgtggttttaatttttatttttttgattagttatgtcgagtattttttttatatgtttgttggttatttgtatgttaatttttgagaaatgtttttttaaattttttgtttattttaaaattaggttgtttttttgttattgagttgtttggatttttatattttttattaagtatatggtttgtaaatgttttgttttattttatatgttgtttttttattttattgattgtttttttggttgtaagaaaaataaggtttttagtttgatataattttatttgtttatttttgtttttgttgtttgtgtttttgggattatattaaaaaattattgtttaaattaatgttatggagttttttttttatgtttttttttagtagttttatagttttaggttttatgtgtaagtttttattttgagttgatttttgtatatggtgtgagatgatagtttagttttatttttttatatgtggatatttagttgttttaatattatttattgaagagattatgttttatttattgttggtttttggtatttttgttgaaaattaattgattatgaatgtgtggatttgtttttgggttattttgttaatgtatttgtttttatgttagtattatgttgttttgattattatggttttgtagtatattagtatattttgaaattagatagtatgatgtttttagttttgttttttttgtttataattgttttggttatttaaggttttttgtggttttatatgaatttaaggatttttttttttgtttttgtgaaaaatgtaaggaaattttgatagggattgtattaaatttgtagattattttgggtagtatagatattttaataatattgatttttataatttataaatataggatatttttttatttgtttgtgatttttttaattttttttattagtgttttatagttttaagcgtataggttttttattttttttgttaaatgtatattttatttatttatttatttttagttattgtaaatgagattgttttattggttttatttttagatagttttttgttagtgtgatgttattgatttttgtatgttgatttttgtattttgtaattttataagatttttttattttttttttagtataatttgtattttgttgtaattagatttttttattattttatagtttttaagtggagttattatggttttttatttatataattatgttatttataaatagtgataatttatattttttttttttaatttggatgatttttattttttatttttgtttaattgttggttagaattttagtattatgttgaatagaaatggttagagtggatttttttgttttgtttttggttttagaggaaaaaaattttaattttttattattgagaatgatattagttatgagtttgttatatatgatttttattgtgttgaggtgtattttttatttgttgagagtttttttttaaattacgaaaggatgttgaattttgttaaatgtttttttagagtttattgagatattaatatggttagtattttttattttgttaaagtggtatgttatatttttagatttgagtatgttgaaatattttgtatttttggaataaaatttatatgattatgataaaagatttttttaatgtgttgttgtatttattttgttagtattttgttgaggatgtttataggttatttgttattgttgttgttgttgagttgtagaagttttttatatattttggatattaattttttattgaaaagataatttgtaaatattttattttatattgttttttattttgttgattgtttttattgatgtgtagaaatgtttaagtttgatgaagttggatttgtgtattttttgttgtttgtttttggttatatttaataaattgttgtaaaatttaatgttataaagtttttttttatgtttgatagaatttttaggagtttgatatttttagtttttatatttaggttttttatttattttgagttaatttttgtatttgtatatggtgttaggtaagaatttaattttattattttttatgtggatatttagtttttttaacgtaatttgtcgaagagattgatttttttttattgtatatttttggtattttggtggaagattatttgattatatatttgagggtttatttttggaatagatagttgatattggggtatttagaaaatagtaagaatttaagagtgtttgagggtttatttttagaaaaaaattttttttatattttataatttttgtttttgtgaattttttttatttttgaaaataaaatttatatttatttatttatttattatttatttatttatttatttatttaattcgattttattgagtatttagtggtaggatttagagtaaagttttttttgtaggatttacgttttttagttatttttagtttttaatgatttatgttttattttagtttttgtaatttttttatatggtcgtttatttattgtatttatagtgtttcgtatttgtatgggatttaaatatatatgttttgaatttagataagggatattgtgttttaagaagttataataatgaataaattttattcgtttagagtaattttttaatggattatatatatatatatatatatatatatatattttttttttttttttttttttttttttttttttgagatagagtttcgttttgtcgtttaggttggagtgtagtggttcgatttcggtatattgtaagtttcgttttttgggtttacgttatttttttgttttagtttttcgagtagttgggattataggcgttcgttatcgcgttcggttaattttttgtatttttagtagagacggggttttatcgtggtttcgattttttgatttcgtgattcgtttgttttggttttttaaagtgttgggattataggcgtgagttattacgtttagttttaatggataaatttaagatataattataagatgggagtggttgaaaaagtagggattttttaatgttttgaaattatgtgataattttttattttttttaagattgtttggtatggtttttttttttattatttttgataaatgtggtatttttaggcgtgagttttttttttattttttatttttttaattataaatgttgttataggttaatagggagaatttagtgatatattatatttatttttgagttgtgatgttggttttttatttttattagttattagatttttatattattttgtttttttttttttttttttttatattaaatattgatttattaaggagttttattattttattatatttttattttaatttatatttaaatttattattgataatgtttattttataaaatatttttttaaagtagttattggtttaatttttagatgatgttattgatttatgataatagggagaataatgtttttattattattttttttttatagttttttaattttttatatagaggttagttttaattgtagaagtaatatggggttttttgtttattaaatattttttttgtaatatttatatttgttttgggatagaaatttgttttttggatattagagtaggaggtttaagaaaggttaaacgttgatataatttaattgttgtagagtgataaggaaggtagttaggtagtatgaggaagtgggaggatgggagttatagagaatttttgatgtagataatgagtttttttttttttttttaagggatttttataattttttattttgtggtattggggatagtggtaatgatagggtgggaagggtagaagaggtttattttaagaggaagtagtaaaaggtgggtttgtgaggatttgtttagtaggttttaatattttatgtataagtttttattttttgaagtgtttttttgatttaggttttgtttattattatttataaattttagtgtttgaaataatttagaaggtggataattagatatttatagattaattgatgatttatatttattttttttttttttttattttttttttttttttttttttttttttttttttttttttttttttttttttttttttttttttttttttatttttttttttttatttttttttttttatttttttttttttttttttttttttttttttttttttttattttttttttttttttttttttttttttttttttttttgttttttttagttttaaaaaagaatgatatagagatgtataatattttttttttttttatttgaaaatttagggatggggtggggttttaagaagttagttttagaattttttttttttattgtggtttttttaattttttattattttataattaatgataagtttgaaaatgagttttcgtattaatttttattattttgataatagattttagaatttagttatattttattgtttggagttagttagggattttttaagtatttatagtgaaatattggtttttatgtttgggtttttttatttattgtttttgtatttggtgtttttgaattttttttgttttttttgtttttgttatttttgtatagattataagttttttttatatagttttagttatatatattcgtgtagtaggatttttttaggggtttagtttgttagaaattagtgatattgttttttatttattttttattggatagagagaaatgttattagaattttttaggaaaagagtttttttgaagtttttatatgtatttagataaatttttttttttgatattttttttttatttttttttttatagttttgtttagaagtttgaatatgttatgatggttggggttttaaatttaggggataatttgaggtgaaggtgagtaaggagatagtttataaagaggtcgtggaagttgtcggggaaggagaatgtttaagtagtataggtaattaaatattttttattgttttaggtgttaaagtaggaatgaaaatttgttttttttgttgaatattttttttttttatttttaaaattatatatttgatgttagtcgttagttttttttttattattttatatttgttgttttggagaatttatttaggtttgtggttttttgtacgtttatattagtaatttttgaatttacggtttttagtatttttttttgtttttatttttaggtggtagttaggtgtttgtatttggttattttaatattaatattattttaatatttgtttttttatgtatttaagggagattttttttttttttaagttttttttattttttttttggggtttttggaataaataatataaaatttgaggtttttttgtgatgttgtttggagtcgagagagagatagagagagagagatatttttaggagggagttgtttcgatttttttttattattcgggagttagttttatatttagttttattgtttggagttttataaaaagattttatgagtagttttttgggaatagtatgtttttgttttttgagaggtaatgatttttatttggattttatataatttttttttagagagtattatagtaaaagtatatgtttattttttttttttaatttttgatatttttaaattttaaggaagggtatggagggagatagattgatgattttgtgtatttgggtaaattaggtttttggttaaaattatttagttaaaaatgttaagtatggttaagggagaagggttagagagtttaaaagaatgaaatttggagataggtaaatttgaaatttatttttttttttatttattattgtgtatgtgatttggggttatatttttaattataattatttattgttttattttagaataaggataaataatatttatgttgaaatattgttgtgagtattagtgtttaataattattattattgtattaatgtaggtttttgattttaaataatagaatgtaaatttgaataattaagtagaaaaggtatttattggaaaggaattaaatagtttatagaggatatgataaaggtaggagttttttatagttgatattgtattttcgtgtattgaattaggagatatatgatgttgatttgttttgttattagtgatgttaattttgattatttgattttagtggtaattgatagatttttttaattataaagttattatttttattgtttgattttcgtatattaaatttattttgtgatgttaattttgattatttgattttagtggtaattgatagattttttaattataagttattatttttattgtttgatttttatatattaaatttattttatgtttatagaataaatttaatttggttattattttatttagtgttatatttaattgattaatagattttttaggagttttgtatttgtgtttaaaaatgagatgagttttatttttgtttttttgtttttgtttttgttttatgtttatgaggatttggtatattgttgtatgagttgagaaatgtttttttattttttcgttttttggaatcgtttgtgtaaggttagtaaatgtttttattgaatatttagaagaatttatttaataagattatttttgtttatagatttttttgtggaaagttttgtaattattaatttaatttttttaatagatataggattatgaaaatttttttattattttttgagtttattttagtaagtggtgttttttagaatatgtttattttatttagttttttaaatttgttagtataaagttatttataatattttttattgtaattttaatgtttataggatttataatgatagtattttttttatttttgatattggaattttatgttttttgttttgttttaaaattttttatagttttgttaaaattttattaattttattagtttttttaaagaaataagtttttagtgttgttgatgtttttttattgtattattattttttattaaattattttttttttttatgtatataatttttttatttttattttttttgggttaaatttgatattttttttttaagtatatgattgatttttagtatttttttttttttaattaattatatgtatttaaggttgtatataatttttgtttagatttgattttagttttattttatgttataatattttgtaatgtaagtataatttgtaatatttttaatttttttttttttttttttttttttttttttttttttttttttttttttttttttaagatagggttttattttgttgttttggttggagtgtagtggtgttgttatattttattgtagttttggatttttgggtttaagtgatttttttattttagttttttaagaagttaggattttaggtatgtagtattatattagttaatttatattttatttttcgtagagataggattttattatgtggtttaggttggttttgaattttttaggtttaagtaatttttttgttttagttttttaaagtattgggattataggtatgagttattatatttaattgatatttttaattttttattgttagggatttgataataattagatttaatttttgattattttttttgatttatggattattttaatttgtattttttaatttttaaattttttaaaattttttggttatttttttgtaattgatttttagttttgttttatttttgttaaagaatattataaaagataaaatattttgaaatattgtatttttttttattgttttagtagttatgtttttcgagaaatttgttttttttttttttgataggttgttatgttgtttaggttatagtgtacgataattttatatttttgggtttaggtaatttttttgttttaatttttttagtagttggtattatagatgtgtgttattttgtttagtataaaatgtgtttattttatttagattatttaattgttggtacgtaattgtatatagtatttttttatattgttttttatttttgtaaagtggtagaaaggttttattttttatttttgatttgagtaatttaatttttttttttttttttttatttaatttagttaaagtttttttagttttgattttttaaaagtaaaaatttagttttgttgattttttttatttttttttattttttagtttatttatttttattttaatattttttttattagttttggtttgttttatttatttttaattttttttttttttttttttttttttgtttgtttatttgtttgtttgagatagggttatttttttgagatggagttttgttttgttatttaggttagagtgtaggggtttgatttttatatattgtaatttttttatttcgggtttaaacgatttttttgttttagtttttcgagtggttggggttataggtgtttgttattacgttaggttaatttttgtatgtttagtagagatggggttatattatgttggttaggttgattttaaatttttgattttaagtaatttattttttttggttttttagagtgttgggattatagagtgagttatcgtattcggttttttttttaattttttaaagtggaaggttgttattgatttgtaatttttttttttttttaatgtaggtatttatagttataatttttttttttattattaaaatgtttttatttttttttagtggtatgtttgtattaaggtttattttgtttggtattagtgtagttattttagtttttttttggttgttttttatatggtgtatttttttttgttttgtatttttaatttttttgtaattttgtatttaaggtttgtttttagtagagaatatatagttgtattatttttattttatttattttgttaatttgtttaaattgaaatgtaatgtatttatatttagtgtgattattgtaatatatttttatgtttgttattttattgtttattttttattttttttatattttttttgtttttttatttttttattattgttttttgttgtgttaaatagatattttttatgtattattttaatttatttattattttttttattttatatttttagtttttttatttttttgttttagtgattattttatagattaaaattagtatattaataatttagtttgtattaatattaatttaattttaatagtatataaatattttatttttatatagttttgttttttattttcgtgttgttattgttatataaattatattatttttatatgtgtgtttattaatatagatttataaatattgtttgttgaagttttaaattaaataggagaaaaagttattaaaaagtatatttatattgttttttatatttatttattttagttatttttttggtgtttttatttttttatatggatttgattatattatattatattttagtgtttttttattttagtttgaaagtattttagtatagttgttttgttaatgatgaaatttttgtttttttttatttgaaaatgttttaattttttttttatttagagtttttggttgatagtttttttttttagtattttgaataagttttttaattgtattttagtttttatggttttttttttttttttttttttttttttttttttttttttttttttttttttatttttttttgttttttttttttatgtttttattttttttttttaaatagggatggagtgttgaatttttatatttaagtaatttttttattttagttttttaaagtgttaggattaaaggtatgagttatcgtatttgattttttatggtttttaatgaaagattatttgttaatttttttgtttgaatgtgataagttattttttttttaatggttttaagatatttttgtttttaatttttaatagattgattataatgtgtgtaggtgtggatttttttgagtttattttatttatagtttattaagatttttagatatgtagattaatattttttattaaatttgtaaagtttttagttattatttttttaaatattttttttggtatttttttttttattttaggattatagttatatatattttggtttgtttgatggtgttttataggtttttgaggatttgtttatttttttttttttattttttttttttttttttaaattggataattaaaattaatttatatttaattttgttgattattttttttgttttgtttaaatttgttgttaagttagtttggtgaaatttttatttttgttattgtattttttaattttagaatttttatttggttttttttttatataatttttgttgttgtagtttttattgggtggtgagatattatttatatgtttgtttttagtaaatatgatttttttttattttttgaatatattttaaatgtttatttaatgtttttgtttagtaagtttaaatgttgggtttttttagagatattttttatttattaattttttttttatgtataggttatgttttattatttttttgtatgttttgtaatttttgttgaaaattagatattttgtgtaatataatgtggtaatttagataatgagatttttttttcgtttttttttttagggtttgtttttattgtttgttgttgttttattttgtgatttttttgaataaattttgtaaagtttgattttttgttatgtgtagttattatatttttttttagttagtttagtggttatttaatgtttgaataaaggttttttaaaatgtttggaataaatatattttttagttttttttggggagttttttttttgttttgtgtttttataagagaatatttgagatgaagtaatttataaagaaaagaggtttattttatttatggttttgtaggttggaaagtttaatattagatagttgatttggtggtttttgttgaggtttttgtgttgtgttaaaatatggtagagaaataaaaggagaacgaggtatatgtgaataggataaaataagagaggtaaatttattttataataatttatttttaagggaattttataattaatttagttttttaagaaagatattaatttaatttaatgatttaagtattttttaaaggtattattttttaatattattagattgggaattaagttttaaaataagttttgatgaggataagttatatttaaattatagtaggttttgtgtgtatgttggtgatatttttaatatttagttagatagttgataattttattttattttttattttttttttgtatagagtattaaggttagtttaagaagaaagtttataatttttttaggttttttttaagtatgtattttattttatatatgtatatggttttttagatttttaggaatatgatggaaataattaaagttttttggatattttattttttagattttttttttaagttttttatttaattttttgttttttttaattgttatttattgttttaggtaattcggttgtttttaattgtttttaataaatatttttatggaaaaggatttttgtatcgggtaagtttttaattaggttaaatgagaattattttgtaaattgggtattttaggaaattattagataggtaaaataatgataattttttgattataaggttttggaaaagttttagttttgttttgttttttttaggttgttgatttttattatgattatagtttgttggtttttaagtttattgtagaattcgagaggatagaatgggaattgtataagttaaaatgttataaaattgtttttattgagattgtattatttttttttagtaaatgttttttggattgttgtaagattttggttaatttttagagttttgaaagagttgattttttttttaatttttgttattttttttgttgtttttatggagaggagagtttttggaggtttttattttgttatttttgttaatattgatttatttataggagtttttaaaaatttatattattattttttagttttagaatttttattaatttttttttatatattttatttttttaataaaattttttattatgatttttattatttttttatatatttattatagttattataaagtttatttttaatttaataattaagttatttattattttttttagtgatgtattttttttttagaaggaattagttttattttttgttaggtatatagagtagaaaatgatttttattttaatttggaatggatttgatttgaagtagagtttaagttttttttggttgttattgtttattgttttattgatattttgattttttaaatttggtagttttagatattattttttgtttttttatggttataagttgtttgttagaattattagtttgttgttttgttttaaaaataagataatttttaggagtaaagtaattggagaatgttggttttttttttgttattttttttttatgattttgtttttttaagttgttattattttgagagttttatgatttttttaagcgtatattttttgtagtttttttttttttgagagggggttttgttttgttatttaggttggagtgcggtggtgtgattatagtttattgtagatttagttttttgagttttagtatttaagtaatttttttgttttagatttttaagtagttaggattataggtatgggttattatgtttagttgattttttatttttatagagtttgggttttgttatgttgtttaagttggttttaagatttttaggtttaagtgatttttttgttttggttttttgaagtgttgggattataggtatgagttattgtgtttggtttattttttgtgttttatttggttttatttattattattggaaggaatattaatattgtataagttattttattatagttaaaaagaggaaggtaatttacggtattgttttttattgataattggggatagaattggaaatttaggtttttttattagtttttttttttataattttttattttagaagtggaagttgatattggatattttttagtagttaagtgtatatattgtattaatatagtatggatttgggagataatcgaatgatgtgttatgattattataatttattattttgattagtaaattatagttattttttgttgggagaatataatggattaaatatatattatgtttgggattagaagaaaaataattttatttttttttagttattatacggtaattattaattttagatatttttagaattaatgatatttattaattagtttattattgatgttattgttgttatagtaaattagaaatgagggattatttttattaatgttagtattttaagtaatattagtaagaaattaataataatttgtatagatgtgtttgggtagatttatttgaggttggggagagagaatagttaagtatattaagtatatggtttggtaaaagtaaggcgtttagtatggttaaagtgtagtgtataatagcgtgatagagagtaaatgattagaataatgagttgatgttttttatttattatttttttgtttttcgttgggtagagaggaggtaaataatattaaatgttggtaagtaataatattttattatggttttatattgaagaattaaggtttatagtgattagtaagtatataaaatataatattgagagttttaagattattagtataagaattagttatttttagtttaaatttatttatgtttttgattaagttcgtgtaataatttaattatgtatggagtgaatgtaaagttataaatatattttttattttgtgtatttttaatttaatttttttttatttgaatttttgaaatatttatggttattttattgtcgtttaataaggggtaaaatgtatgatggatgagaagttagaatgaagaaatataatagttttaataatttgttgttaaattattttattttttgtagattgtataaaaatatatgatgttaaaaggtttttgtaagaaggggtttcgaatattaagtttttttagattaaaggtaagttagtttttgtataaggataattttatttttatatttgtttttatttttttttttttttttttggatttggtttttttttatttttttttttttgttattttatttatttattttttttttgtttatttattaattggttgtaatttagaaatgaaaaatatgtattttaatattttgatgtatttatttacgtaataatgtaagttttgaagatttggaatgtataagtgaaaatgttattatgttttgtttttgtaaaataaaaattaaattatatgtttgggttgggggttttggtttttgtttttagttttaaaattttttgatatattatatttgaatatatttatgggttatatgtgatattttgttatatgtatgtaatgtaatgatgaagttagggtgtttagggtatttattatttataatttattatttttatgtattgagtatattttaagtttttttttttagtttttttgaaaaatattatatattgttgttaattatagttattttattttgttattaaatattggaatttattttttatattagtataggtttataattattaattaatatttttgtattttcgtttattttttagtttttggtatttattattttattttttattttgatgtgattaattttttaaatttttatatacgagtgagaatatgtgatatttgtttttttgtgtttggtttattttatttaatattatgacgtttatttttatttatgttattgtaaatgatatgattttatttttttaaatggttgaatatttttattgtttatatatattatattttttttatttatttatttatttatggatttttaggttgattttatattttggtttttgtgaatagtgttgtaataaagaatgtgtgtatttttttgatatattatttttttttttatttggataaatattaattagtgagattgtttgattgtgtagtagttttatttttagttttttgagaaatttttatattattttttatagtggttgtatttatttatattttaagtaatggtgaataagagtttttttttttttatatttttgttaatatttgtggtttttttgttttgtttgtttgtttgttttgttttttttatagtagttattttaattggggtaaaatgatattttattgtggttgtttgttttgtttttgtagtgatgggattttattattttgtttaggttggttttaaatttttggtttaagcgatttttttattttggtttttgaaagtgtcggtattatagttatgagttattgtggtttgattttattgtggttttgatttgtatttttttgatgattagtaatgttgagtatttttttatgtatttgttgattatttatatgttttttttttttttttttgtttttttttatttttttttttttaatgaagagaataaatgtttgtttttttttgggaaatgtttgtttatgttttttgtttattttaaaaatggggttattaattaattaattaattaatttaattatttatttttgagattagattttgtttaggttagtgtgtagtggttttatagtttattgtagtattaaatttttgggtttaagttatttttttgttttagttttttagttgggattataggtttatgttattatattaggttatttggttttttttaattttagtaagagattgaagtttagttatgttttttgggttgattttgaatttttggatttaagagatttttttgttgtaggtttttaaagtgttgatattataggtattagttattatatttggttaggattatttatttttttattatgaagatgtttgatttttttgtatattttggatatttattttttgttggatgagtagtttgtatatatttttttttatttaagaggttttttttttattttgtagattgttttttttgttgtgtagaagttttttagtttaatatagttttatttgtttatttttggttttgttattggtgtttttgagattttagttataaaatttttgtttagatttattttttgaagaattttttttatgtttttttttagtagatttatagttttaggtattatatttaagtttttaatttattttgagttgatttttgtatatggtgagaagtaggggtttagttttatttttttgtatatggttatttagtgtttttagtattatttatagaaaaggatgttatatttttaatgaatattttttatagttttattgaatgtaagttagttataaatatgtggatttatttttgggttttttattttgttttattttttttttaaaaaaatttatttttataggttattgggaaataggtggtgtttggttatatgagtgagttttttagtgaagatttttgagattttggtgtatttattatttaagtagtatatattgtaattaatttgtaattttttattcgttattttttttttatttttttttgtagagtttttaaagtttattgtgttatgtttatgtttttgtatttttatagtttagtttttatttatgagtgagaatatacgatgtttggttttttttttttgagttattgtatttagaataatagtttttaattttaaataggttattgtaaatgttattaaattatttttttttatggttgagtagtattttattatatatatatattttattatatatatatatatattttattatatatatatatattttattatatatatatattttattatatatatatatattttattatatatatatattttattatatatatatatattttattatatatatatattttattatatatatatatatattttattatatatatatatattttattatatatatatatatatatattttattatatatatatatatatatatatatatatatatattaaagtttttttatttatttattgggttatttttatatttttgtaattgtgaatcgtgttgttataaatatgtgtatgtaagtattttttttgtataatgatttttttttttttgggtagatatttagtagtgggattgttggattaaatggtagttttatttttaggattttttaaggaaattttatattgttttttatagtggttgtattagtttatatttttattagtagtggaaaattgttttttgtttattatatttttgttaatatttattattttttgattttttgattaaggttatttttttaggagtgaaatggtattgtattgtggttttgatttgtatttttttgattattagtgatgttgagtaattttttttatgtttgttggttatttgtatgtttttttttgagaattgtttatttatgtttttaatttatattttatgggattgtttgttttttatttattaatttgtttgggtttattgtagattttggatattagttttttgttatatgtatagattgtgaagatttttttttattttgtgggttatttgtttattttgttgattgttttttttgtcgtgtaaaagttttttagtttaattaaggttttagttatttatttttgtttttattgtatttatttttgggtttttggttattaaatttttgtttaagttaatgtttagaagggttttttcgatgttattttttaaaatttttatagttttaggttttagatttatgtttttgatttattttgagttgatttttgtgtagagtgagagatatggatttagttttatttttttatatgtggtttgttaattattttagtttaatttgttaaatagggtgtttttttattattttatgtttttgtttgttttgttaaagattagttggttgtaagtatttgggtttatttttgggttttttattttgttttattggtttatgtgtttatatttatattagtattatgttgttttggtgattatggttttatattatattttgaaattaggtaatgtgatgtttttagatttgttttttttggttagttttgttttggttatgtgggtttttttttggttttatatgaaatttagaattgttttttttagttttgtgaagaatgatggtggtattttgatgggaattgtattgaatttgtgattgttttttgtagtatagttttttttataatattgattttatttatttatgagtatgggatgtgtttttatttgtttgtgttatttatgattttttttagtagtgttttgtagtatttttggtagagatttttagtttttttggttaagtatattttaagtattttttaaatttattttcgggaaattattgtaaaagggattgagtttttgatttgatttttagtttggttattggtgtatagtagtgttatttatttgtatatatttattttgtaatttgaaaatttgttgaatttatttttcggatttaggagttttttggatgagtttttagggtttttgaagtatatgattatattattagtgaatagtgatggtttgattttttttttatttatttgtatgttttttattttttttttttgtttgattattttggttaggatttttaattttatgttttgttttttttttttttaatttgtaattttttttttttttttttttttttatttttattattattatattttaagttttagggtatatgtgtataatgtgtaggttagttatatatgtatatatgtgttatgttggtgtgttgtatttattaatttgttatttagtattaggtatattttttaatgttaatttttttttttttttttattttataatagtttttagagtgtgatgtttttttttttgtgtttatgtgtttttattgtttaatttttatttatgagtgagaatatgtggtgtttggttttttgtttttgcgatagtttattgagaatgatgatttttaattttatttatgtttttataaaggatatgaatttattattttttatggttgtatagtattttatggtgtatatgtgttatatttttttaatttagtttattattgttggatatttggattggttttaagtttttgttattgtgaatagtgtcgtaataaatatacgtgtgtatgtgtttttatagtagtatgatttatagttttttgggtatatatttagtaatgggatggttgggttaaatggtatttttagttttagatttttgaggaatcgttatattgatttttataatggttgaattagtttatagttttattaatagtgtaaaagtgtttttatttttttatattttttttagtatttgttgttttttgattttttaatgatcgttattttaattggtgtgagatggtattttattgtgattttgatttgtatttttttgatggttagtgatggtgattatttttttatgtgttttttggttgtataaatgtttttttttgagaaggggtgaaagttagtatttttgtttttttttagtttttaaggggaatgtttttaatttttttttgtttagtataattttttttgtgggtttgttatagatggtttttattaagttgatgtatgttttttttatgttaattttgtttagggttttaattataaagcgatggtaaattttgttaaatgttttttttgtgttttttgagttgatgatgtgatttttgtatttaattgtgtttatgtgatgtattatatttattgatttgtatatgttaaattatttttgtatttttggtatgaaatttatttgattatggcgtattatttttttgatatgttgttggatttagttagttagtgttttgttgaggatttttgtatttatgtttattagggatattggtatgtggtttttttttttttttgtttatttttagttttagtattagggtgatattggttttatagaatgaattagggaaaattttttttttttttatttttttgaatagttttagtaagattgatattaatttttttttgattgtttgatagaatttagttgtgaatatatttggttttggatttttttttttgggtagtttttaaattattattttaattttattatttgttattggtttgtttagagtttttatttttttttgatttaatttaggagggttgtatatttttaagaatttgtttattttttttagattttttagtttgtttgtataaaggtgtttatagtagtttttaatgattttttgtatttttgtggtatcggttgtaatattttttgttttatttttaattgagtttatttggatttttttttttttttttttggttaattttgttaatggtttgttaattttgtttatttgtttaaagaattagttttttattttatttattttttgtatttttggttttaattttatttatttttgttttgaaatttattttaattttatttatttttttgttatttattttattttgatgggtttgggtttggtttgtttttgtttttttggttttttgaagggtgattttagattgtttatgttgattttttgatgtttagattgattttttgatgtaggtatttaatgttatgaattttttttttagtattatttttgttgttttttagagtttttgtttttgttttgttttgtttttttgagagtttcgtttttgttgtttaggttggagtatagtggtataattttggtttattgtaattattattttttgggtttaagtaatttttttgttttagtttttcgagtagttgggattataggtatatattattatattcggttgatttttgtatttttagtagagatggggttttattatgttggttaggttggtttcgaattttcgattttaggtaatttatttatttcggttttttaaagtgttaggattataggtgtgagttatcgtgttcggtttttttagagtttttgataaattgtgttattattatggtttagtttaaagatttttaaaatttttattttgattttattgttgatttaaagattattcgggagtagattatttaatttttatgtatttgtatagttttgagaatttattttggatttaatttttagttttattttattgtagtttgagagggtatattatataattttgatttttttaaatttattgagatttgttttgtggtttattataatatttgttttggaggatgttttatatgttgatgaaaataatgtatattttgttgttgttgagtagaatgttttgtaaatatttgttaagtttatttgttttatagtgatatggtttggatttgtgtttttatttaaattttattttgtagtttttataatttttacgtgttgtgggaggtattttgtgggagattattgaattatgggggtgggtttttttagtgttgtttttgtgatagtgaatgggttttaggtgatttgatggtttcgaaaacggagttgtttttataagttttttttttgtttgttattatttaaggaagatgagatttgtttttttttgttttttattatgattgttaggtttttttagttatgtggaattgtaagtttaattaaatttttattttttgtaaattgtttagttttagttatgtttttatcggtagtgtgaaaatagaataatatagtaaattggtatcggtagagtggggtattatagaaaagatatttaaaaatgtggaagtgattttggaattaggtaataggtagaggttgtaagagtttggagggtttagaagaagataggaaaatgtgggaaaatgtggaattttttagagatttgttgaataatgatatggataatgaaatttaggttgagatggttttagatggagatgaggaatttgttgggaattgaagtaaaggtgatttttgttatgttttagtaaagatattggtggtattttgtttttgttttagagatttgtgggattttgaatttgagagagatgatttagggtatttggtagaagaaatttttaagtagtaaagtatttaagaggtgattggagtgttgttaaaagtatttagttttaaaagggaaatagtataaaagtttgaaaaatttgtagtttgataatgcgatagaaaataaaattttattttttgaggagaaatttaagttagttgtagaaatttgtataagtaataaagagttaaatgttagtgtttaaaataagtttttttcgttgttttttttatttttgtgttttttttagtttttaaatggatttagttttagtttaggttagaatttttttttatgatttatatttttaggttttttagtgaggtatgtatttaagggtggaagattttttttttttatttttatagtttgggtatttatagtatttgggatgttttttaggttttgtaggagtaatttgttttttttagagggtttgtgggtttttttagtttttttagttatttttgtaataggtttggagtaaaagtttatgatgtaagattttataagttgttttgtttatttaagttggaggggtaatgtataatgtttttcgtttattatgattttgttttttattttgttgtattttattggtttatgtgtttgttttttatattagtattttatttttttggttattatagttttgtaaaatgttttgaatttaggtattgtgatatttttagttttgttttttttgtttaggatggttttgtttatttaggattttttatggttttatataaattttaggattgttttttatatttttgtggaaagtgatattggtattttgatagggattatattaaatttgtagattgttttgggttatatggttattttaatgatattaatttttttgatttattagtatggaatttttttttatttgtttgtgtttattttaattttttttattagtgttttgtagttttttttgtagggattttttatttttttggtaaaatttattttaagtattttattatattttttgtagttattataaatggaatttttttttttattttttttttagttattttattgttggtgaatagaaatgttatttatttttgtatattaattttgtattttgttaagtttattgaattggtttattagttttaagagtgttttggtggagtgtttggtttttttaaatataagattattttggaatttgttttatgagtttttgttaggaagatggtagataggagatagggttgatgtgtagttttttttggatagatagaatagtattatgttgagtaggaggggtgaatatgtgtatatttgtttttttttagtttttaaagaaaaagtttttaattttttattattttgtatgatgttagttgtgggttttgttatatagagtttttattatattaaggtatgatttttttatgtttagtttgttgagagtttttattacgaaaaggtgttgaattttattaaatgttttttttgtatttattgagatagttatatggattttggtttttattatgttgatgtgatgtattatatttattgatttgtgtatgttgaaatatttttgtatttttgttgtaaattttatttgattatattatattattgttttgatttattgttggattcggtttgtttttattttggtaagtatttttttatttgtatttattaggatatttatttgtagtttttttttttggagtatttttgtttgggtttgttattagggtaatgttagttttatagaatgagtttgggagaatttttttttttttaattttttggattagttggaggaaaatcggtggtggttttttgaaagtttggtggaatttattagtgaaattatatgtttttggattttttttttttgggagattttttattattgattttattttagtatttagtattagtttgtttagattttttttttttttgatttaattttggtaagttgtatgtttttagaaatttatttatttttttttgtttttttagtttgttattatatgtttgtttataatggtttttgattattttttgtatttatgtgggatttgttgtaatagttttttttttatttatgatatggtttatttgggtatttttttttttttttttggttagtttagtgtgggggtttagttaggatggtgggagaaattgtaaaattataggatatagatataaatttttttggaaggtcggaaggtatttgtaaaagttttaagatagggttatggttgaaagtagcgtaatttttattttgagttaattgtttggggtatagatataaaggaatatttatttaaatagtttgtttatttatgtggtcgtaagattaatatttgattaattgtagatgtataattgttttttatttgggggggtcggtaaataggttaattgttttttagtggtgtgaataaatgcgagttttgttggttgattagggttatagatgtaattttttatagtattttttttggtgtttgtgtgtggtttggatttttagttgaattgataagtaagatatttgtgttagtgtatattttttatttattattgggttagggtttgtgggttagattattatagttggtgtttcgcgtgaggaatgttgtaaggggagattgatgaattttttgaaaatgaaggtgaaaaaggaattgcgtagttagtgagtaattagtaagttattggtatttgtttgggatttttaagttcggggcgggggattgtttaggttaaggttttattatgggataatagttattagtttaatagaaatagtatataaaagtattgaaatggttgtttaaagttagtagagttttagttttataggtttaattaaggaatttaatgtaaattgttgtattttataatttatggtttttttaagaaggtatgttagatttagagttttgggaacgagtgggaaaaaattttaagtaatattatgtttaagggtaacgggttttagtattatttttaatgttatgggttttagtaagggcggttttggttttattatatatagaagagtttaaaaaggggaaggataaggtattattatgtattttattattcgtaagttttttagttttgatattattaggttaaaataataaagaggaaatggaggttttgtttgagtttttttttttaatagataggaaaaaagataggagatatgttttagttatgggattttgttttaagtaagtggtattggaaggggagtttttagtttgtttggtaatgtaagatcgataaggtaattaggtatatgaatttattttttttaatgtttataaggagttaagaaaaagtattaaagaaaatagagttgttagtttatttatgaaaggaatgattgaggttttggtagattatttttttatgattttatgggattgggtaatgttaattaaaataattttggagtttagttaatattttttttggaaggtagaatatgatgagttgtgtgaataataagttaattagaattaggcgacggggtaagatttaatagttgttatgttttaggggaaggatttttatgtttatgtataacgattagattttgattttttaggtttaaaattaagtgtttttgtgtgtttttagggtttgggattgaatttttgaaagtggagtttagtaaggattttttataaatgtttaataagggttttaggagttatttgttgagttttttaattggttaatttaggtaattaagagataaattagttacgtttaggttgttgatattttattgttgtaattggtttttgaaaatttttatgtggattattagtaggtaatgtaggtaattagaagaaaggtagttatagtcggggaatttatatgagtatgttagttggtgggaattgagatatataagttaaaatattggttatggtattaaggttttttaaagtgaaaagggagagaagttaaagttgttttttatgtggagagttagattatatgaagagggaatgtttttataatagagacgaaggtaatttagggaaagaatttttttttatatgtttcggatgtaaaacggtgaaatattgggtaaattaatgtaggttaaaatttgataaaaatagaaattttataagtaattaggtgggaaattttatgatgggttggttttaggttttgttttaaattggggtaattttattagtttttttcggtttgatggagagtttatagtttttttttttagagtagttattattgggagtgtaggattggatttattttgttttaataaattagtgttgaaagaaggagaagattttaaaagggttgtatacgggatttggggttagttgtttttagaagtagtgggattagttttagggcggtttagtttgtttagtaaaggaattaatgtgtttattggggtaattggtagtgattattaaggtgagatattggttatgatggaatgtaaaggtttgaatatttttttttttggattaaagatagtttagttattgattttgttatattgggtttttagtgtttacggaaaggaaaggggaaaggaagttttgggagtataggagttataggagtatatgggaattaattaattattgattagagatttatgattattttaaaaattggaaataataattttattggtttattggatataggggtggacgttttaattattagtgattaaaattggttagaaatttggttttgggttatttagaaataaaaaatggtttgtattagggaagtatatagagttaagtagagtatgtattttttaatttgttgtaatttagaaggaagaaaggtagttatataattcgtaagtatgcgtatttttgttaatttttggggataggatttattagtttaatgcgggaggggtgatttttagttttttttataataatggttattgttattattttttttttattttcgtcgtagtttttttaagatttaatttgagtagaatagtggtttttgaagggagagaaattataaaaagtttgtgaattagttgaagagtaattaaaagttgggtatgtagaattatttatttgtttttggaatttgtttatttttattatttttaaaaagtttgggaaatggagattttgtatgatttatgtgttgttaatgttaatttgtaatttatgggatttttttaatagggttttttattttttgtggcgatttttcgagattggtttataattattattgatttaaaggattgtttttatatgatttttttagtagaataggatagagaaaaatttgtatttataatattagttattaataatgaaaggttagtttgttgattttattggaatgtgtttttttaagggatgttaaatagttttattaagtgttagtattatgtaaattaagttttgtttttagtagaaaagaattttttaattgtaagattattcgttttatgaatattttattagtaattttaatagagttaatatttttaaatttatatatttttgttataaagaataaatagttaagaggtttaattattgtatttgaaaaagtataattttttttttttggaaatatattttgggtatatgttaattttttggttagtaagattttaaaatgttaaattaaatattagtaatttatattttttaaatgattattagaaattattaggtgatattaattggttttgttttattttaggtatttttatttataagttgtaaaatttgttttttattttaaagggtaatatagttttgaatttttttagatatttaaattttgtagtaaaaagggaaattgaggaaatagaataagttattttttagaggtaattagattatatagatatttattattttatttagttgtttattttttttattaaatatttttttttaggattaataggatcgatgattttaggattgcgttttttagaatggatttttttttgtttatatattaggattaaaatattttttttttatatttagttaattagtaaagtcgtatatttaggttttaaataatgtagttagttgttaggttatgattttgatattttgaaattattaggatttttttaagtaaaaagtaattagaagtagttttgtttttattgttagatttgtaaatagttttttttgattatataggataaatagagtatgttttttttgttgataaatttttttattttttattttatatttttgtgattttgttaataaaaatagtttatttttttatatttaatgttttaatattgttttttgatgatttaggtaaatatggaaaggcggtaatttggtggagattatataatttatttatttaatttgggtttattagtatttagagaggtgagatcggggttttgatattggttttggaaattttttttatttagttattaatatagttagtgattttgtttattttgtttatttattgtaaaattttgaagtagtcgtaattaagtttattttggagtttgttttgtgtgttttttttttttgattttagtaattgttagattaatgtatatattttatttttattatatatattcgagtttatagtttattgtttggtttattggtttatggtagtgattaaggagatttttaggtgatgatattattgtttgattaaattatttaatcgtattaatttttttattaaaattggagaaatttatttaagtaattttaatttatttagagattggttaaataaattattttataatttttaaattgttagttaataggtatgtttttttttttaaaaggtgttaattttagaggattagaatttaattagttatggtaaatagaagttatatttttgaaattggaaaattaagatatgtatatgtatttattgatattagtatttatttaattagtgtatacgtttttttttggagagtttatttaatatgttattaaatatttttttttaatttttgtatgtatggggcggtttataaaaattaaaattgataatggtttagtttatgttagtttataattttaataattttgttatacgtggaatatttaacgttttataggtatttcgtataatttttaaggacgggttatagtagaacgtgtttattttagttttaaaaatatgtttaaaaaatagaaaagggggagtatgggtaaagattttgtaatattattggtataagttttatttatttttaatttttaaaatgtagatgataaattttaattaattatagagaaatattttttgttaaaattttttaagatataaaatttgtagttttatggaaagatgtaagtagtaatgtatggtgtggtttaaatgaattgttaatttggagaagagggtatgtttgtgtttatatttttttaagttttttttggattttagtaagatatattaaattatattatgatatggttaggatttaattcggtattagaaatgaaggaattaattttgtaggatttacggtttcggatgatgtagttttcgtggatgatataaattttagatattattgggggatgttgaagaggataatttaggaggttgaatgaattttgttttggatatagatattatttattttagataatttgttttttgttatgatttttgttgtatattgtaatttatgtagggtattgattttttttatgttcgtgttttgtttgtaatttgtttttgttatattttattgggtttatattttagattcgttttttttttattttgttatttaggtagatattttttttttaatttttaataatataattgtttggttaggagggatagatttatttttagtggggtttttcgataatggtatatattggattaaggtgttagatatattatatattattttattatttttttattgtgtgtaagttataaagattataatttttattgtgtatttgtttaaatataattatggttatattatggtaaaagaaatgtttttaaagttttagttgtaggtagttttaaattaggtaatgtaattaatgatttttttttaaatatttttttttgtgttaaagaataaagttgggaaagtaatggattttattttagttgggaggtttgttacggggaataagtttgtagtttttagttaggttattataatattttagattggagtttttacggttatttttagggtatttttattgatgtttttatttattatggtgttaattatagttttgtagttttattacgtttttttatgatttaggttaatgggggggatgggttattttatattttaagtaaagtttatgttatttaagatattttacggtatttgggatattttagtattttttttttatttggtatgggatatattataattttagtggtaaatatattataatttttatttataattatattgattagtgtttaatttatattatttatatatatattttttttatggaaattgatatttttattatattttaaaatttcgtatttgtgatttaggtgtaggaataggtttggtttgttttatgtattattaattataatatatttaatttaaatattattagtgttatggtattaaggagataatttgaggtatttttatttagttaatttgatatgcgattggtaaggtttttttgtttttgttatttaagaatgtgttttgttttaggttagatttaaaagatatataggtatatttatagtttttatagttttagttatagttattttagtaattgttagtgtggttgtagtagttattattgaattagtataaataggtgtttttgtagataatttggttagaaatgtgtttaatgaattttttttatagtagggtatagagtaaaagatttttgtacgtttgtaagtttttgaggtttttgaggttgttttggaatatatgggggagtaataagatgtattggtattttaatagtaattaaattgcgattgggcgtataaatatatttgcgttatttttttattatagaattaattaatatatagttgggatgaagtgaaataatatttttggggaatattttatgataatttaatagtagatgtaaagtaattttaaattaaaattttagaatttttttttattatagatttatatatttaataaatagttatatggaagggtgtgtaagattattatttttggttagattttcgtttttggggtttattttttgattggaaaagaatattgttaattatttttatgattgttttatgttatttgttaattttaggatgtaaagtcggaataaaagcgatgattgttttgtttgatagacgtgttgttgtatataattgtatattttagttaatagaagagcgtgtgtatttattagatgagtgttggtattaatggatatatgtatatattttagttttttaaatttagggatgtaatttttgtttgttataattgattaggttttaattttttagggttaatattttttgtgttagaatttgtgaagtagaagtaatttagaagtgttttttagagagtagatagttttttttttaatcgtttttagtttagtagaatttagaaaggtttttaggaggttaattagtttttttgatttaatattgaattgtaaaatcggatatggaagttaaattttatagtggatttaataaagtagttaatgggtattatgtttttgagaatttgaataggtttttgagagttgtaattagaagaaaagtaaagatttcggattttagtattaagtaggttttttttagtaatttataatttgaagttttaaggaaaaattattttagtatatattaaaattatttttatgtgttaataggtaaggagatttgtatttatattttgttttatttttttttaattcgtttttgtgtattatttttatgttttttttttagttttattttgtttgggtttgtttatttgttatttatatttatttattaattttaaaatattaaaaggatttaggtagggtagttttaattggtggttgtatagagtgttattttttgtgaggtagtaattttaattttagttggtatatattttagatttttttaatagtagaagatgtaatttttttaagaatttattttaatttttagtttttttatttttatgtttacgtgatattttgatatatttttttattatgaaatagaattgtttttttgatagtatgttatattttttttttttttgtaatttatttaggataattttagtatttttattatttggttataagtgaggatgttttatatttaaattttattggttggagggaaagttattaagtagaagtgataatttttgttattatagttttttttaaattttttttatcggtattttatttttatttttagagtttagttttaattattaaatagatagttgagtgtttaatagtttttttatgggatagatttttttagttgattgtgtattttaattttgagtaatggggtttttggttaagagagagaagggaaagtagagagggaagtgttgtaatgttatttttttagagaggaaatagagataaatagtttttatgggtgtaatatatagtttttattgttttataataagagtaattgagtttaaatattaaaaagggtttttttatgtgagttgaaaatagaaagagagagtaaatgggaggatgggttggagtaattttgtttgaagtttttttattttaaggaagaattttttttttttttgttatatacgagtgtttagggtttatataagttttatttgtacgttgttaggagtagattattttatttaagataataaaaaaggaattattatgtattttatatatttagagatacgtgcgtatattttttttataaataaagtaatatatttttgtttgattttttaggatttttatagttgaggtatagttatttggagttagagatttttaaattaattttggttttgttttttttattttattaaattaaatttgattagattttttaatggttttaaaattataattttttgaattattttatttttgttttttatttttttttatatttttgtttaggtggtatagattttttttaaaaatttatgtttgagtgtatagagttttaagtaaagtttaagtagggaataggagatttattattttttttattatagaaatattgttgatattaatgtaggttaatgttatattaagttttttgataggtatattaaattatttggttttatttagttggtggttaattagatagttataagtgagatggagagataggttattttttttttatagtttttttttttttattttatttattttaaaacgttgaggtaggaaataatgtatatttttttgtgtattgtttttttattttttatttttaaatggagatatatttaaggtataatttttagttttttgtttatttttttatatttatttttttgtagattttagttatttttatggtattaattatgatgttatagaaaaatttattagtgtatagtttttggttttattttagtatatgtattgggtatattcgtttggatgtttcgttattattttaaattttgtttttaatttttttgttagaaatattttttttttataaattatgttttgtgtttagtatgtttatttggtatttagtttaagaaggatattttttggttatgatttgatttttgtatgaaaaaaatttttgttgtagaaattagtatattattttttttttattattattattttattgattatttttgggtgtttttcgtagagggggatttggtagggttataggataatagtggagggaaggttagtagataaataagtgaataaaggtttttggtttttttaggtagaggattttgcggtttttcgtagtgtttgtgtttttgggtatttgagattagggagtggtgatgatttttaaggagtatgttgtttttaagtatttgtttaataaagtatattttgtattatttttaatttatttaattttgagtggatatagtatatgttttagagagtatagggttgggggtaaggttatcgattaataggattttaaggtagaagaattttttttagtatagaataaaatgaaaagttttttatgtttatttttttttatatagatacggtaattattcgattttttaattttttttttatttttttttcgtttttattttataaaatcgttattgttattacggttcgtttttaatgagttgttgggtatattttttagacggggtggtggcggggtagaggggttttttattttttagtaggcgcggtcgggtagaggcgttttttatttttcggatggggtggttggtcgggcggggggttgatttttttatttttttttcggacggggcggttggtagggtagggggttgatttttttatttttttttcggacggggcggttggttgggtagaggggtttttattttttagtaggggcggtcgggtagaggcgttttttatttgtcggacggggcggttggtcgggcggggggttgatttttttatttttttttcggaggaggtgattgtcgggcggagacgttttttaatttttagatagggtggttgttgggcggaggggttttttattttttagacggggcggttgttaggtagagggtttttttattttttagacggggcggtcgggtagagacgttttttatatttcggacggggcggtagggtagaggtgttttttatattttagacgatgggcggttaggtagagacgttttttattttttagatgtgatggcggtcgggaagaggcgttttttattttttagatgggatggcggtcgggtagagacgttttttattttttagattgggtagttaggtagaggggttttttatattttagacgatgggcggttaggcggagacgttttttattttttagacggggtggcggtcgggtagaggttgtagtttcggtattttgggaggttaaggtaggttgttgggaggtggaggttgtagcgagtcgagattacgttattgtattttagtttgggtattattgagtattgagtgaacgagattttgtttgtaatttcggtatttcgggaggtcgaggttggcggattattttcggttaggagttggagattagtttagttaatatagcgaatttttatttttattaaaaaaatacgaaaattagttaggtgtggcggcgcgcgtttgtaatcgtaggtattcggtaagttgaggtaggagaattaggtagggaggttgtagtgagtcgtgatggtagtagtatcgtttagtttcggttcggtattagagggagattgtggaaagagagggagagggagatcgtggggagagggagagggagagggagagggagatcgtggggagagggagagggagagatattattttttaaaatatggagagaagatattttggtggttgaaagtgtggtttggtgttagatataaatgtgtaaatgtttttttgttgttttgtcggttttagtatatttattttatagttgttggaaatatcgaaggttttttttttgtttgtgtaaattttaatttttattaaggtgttatggatttttaaaattagtattttattataaatgttttagtattggttaatttttgttaggattattattgattaagtaaataaatttaatagttattaggaaaaaaaaagaaggttattttttttttttaataaatgtattatatagttaatagttttatttatatagaatgtatagaaattgtttatagaatgtttagtattttgtatttttgtagtagggaatatttttttattgaattttatttttatattagataatttaatagttttatggagaaagtaaaatgttcgttttttttttttatttaaaattgaaaattttagttgttggtttttatggatatattttattaggtaatttttttttatttttagttttttaggattttttattatgaatgagtaaatgtttttttttgtatttatttatataattatataattttttttttgtattttgttaagatgtggaattatattgattttttgtatgttaaatatgttttttatttttggtataaatttttatgattatgttatattattttttttaatatattattgaatttaattttaaaaaatattttgttaaatatttttatggttatgtttgtgtgtttttagttttttttttttttaatgttattgtttgatgttagtatattggatttgtaaattattgggatgtgtttttttttgtttttttgttgaaagagtttgtattgagtttgtattgttttttttttaaatgtataatagaattaattatatagatattaaaagtattatgatagtattatgatagaatattatggattaattaatgaagttatttgatttggaaattatttggttttttttgtgagaaggatttttaaaattataaatttaattttttttattgatagagatttttttttgatttagttttggtaatttgaatcgtttaagaaatgtttttattttatgttgttaaaataaaaattttagagaagttgaatttaatagagtttatttagtaaagaataatttatgaattggggagtttttagaatttagaaagatttagaaagttttgtttagtaatatgtgaaggtagtgtttatagataaaaataggaagtgatatttaaaattagttaatttattatagtttagtgtttgttttatatgggtatggcgtgatgaggtatttgtttatgggggatataatatgattatttggtagtttgtgattggttgagatttagttatttattataatatttttaagttaggttgtagtttgtttgtataacgtagttatgttaagttgggttagtttgttatgtaggaatttaagatatggagaaagttttatattaaatttaatttaatttaataatgtaaattgttaaatttattgttatttttgtttattggtatttttatagtattttgttataatatttttaatgtttgtatgatttgttgtgacgtatttatttttatttttgatattggggatttgagttttattttttttttttgatttatttatttagagatttatgaatgtattgagttttattgaaaattagtaattgattttgtttattttttttattgtttgtttattttattgtatttatttttgattttattaattttgggatttatttgattttttttttttagttttttaagatgggaatatagatggttgattttagagttttttttttttttaattatgtaaagttataaattattgtgtaattagtgtattatattaattttgatagtgtgtttttatatttatttagtttaaaatattttttaattttttttttgattttttttaaatttaggtgttgtttagtagtatattttttaatttttaggtatttgggatttttaaggtatttttttgttattggtttttaatttaatgttattgtggttcgagaatgtattttgtatgattttaatagagatatttatttatttagatatttatttatatgtgtttatgatttagtgtatagtttgttttgtggaatatttttgagtatttgaaaataatgtgtattttgttattattgggtggaatattttatagattttgattagattacgttggtttattgataatgttatttaaatttattatgtttttatgaagtttttttttaaatattttattgtttattgagtgttagaatattaaaatataattgtgaatttgtttatttttgatttatttttattatttttggtataatgtgatttaagatatattttttagaataaatatatttaggattgttatatgttgataataaaatgattttttattattatgaattatttttttttttttttggtaatatttttgagttttatatttttgatattaatatagttattaatatttttatggttggtattattttcgttttttttttttttattttaagttttgggatatatgtgtagaatgtgtaggtttgttatatagttatatatgtgttatgtggtttgttgtatttattaatttattatttaggttttaagttatgtaatatattcggtatgtgttttaatgttttttttttttttgttttttatgttttgatagattttggtgtgaggtgtttttttttttgtgtttatgtgttttaattgttgaatttttatttacgagtgagaacgtgtggtgtttggttttttgtttttgtgttagtttgttgtgaaggatggtttttagttttatttatgtttttataaataatatgaatttatttttttatggttgtatagtattttacggtatatatgtatttttttatttttttattttttatttgtttttgtttttatatttaaagagggtattatgtagagagtatgaagttggtttgtagatttttttgtgtattttgataatttttttttttttattagaatatttaggttatgtgtatttaatttaattattagtatggttgttttaaattttattattttatagtttgttttttttttgttttattagatttttttttttttatttttttattttgaattaattatgtttagtgttttattttattttttttattggttttttggttatattttttttttttttaatagttattaggagtttaaaatatttattttaatatattttatttttaaataataatatattatttaatatgtataagaaatttataatattatatttttattttttttttttattttttgtgttattgttattatattttatttttgggtatgttataaatttttaaataatttttattttaaataattttttttttaatttaaaaaaaattagagaatatgtttttatatttatttgaatttttattattttatgttttttttatcgtaatatttaatgaatatttataaagaaataaaatttttgtttaaataagatatttttttttataattattattatttttaaatttttgaaagttttggtaattatgatttaagtttttttatatggagtgattatggttggtaaaaattgtaatgaattagggtattttaaaaattttattttttggtttttagtttattatgtagaaaaattttttatgaaatattgttataattataatatagttttgggaaggaagtttaggggttgtgaatggaattttaatttgtttgaaattttgatttagatagattaaatttttttttttagagattttaaatattgtagtttttaaattatatttaagaaaatttttatttaagtaaaattttttttaaatattttttttttattttattttattttgtagttagggaaaaatttaggattgaattaatatttttagattttttcgtttaagtgggattagaatttttagtaattatatcggtaatagaggttgaaattatatttttaagaaatagtatttatatgtgatttggttttagatttttagtaagaatgatttagagttttttcgttttgaaatattgaagtatttattggttttagggtattttcgggaaggtgatagtgaggggttttttaaaggagaatagaggataaaaggtttaatgaaaggataatttttatattagtgttattaaagtgttattaatttttatttgttggaaattttattaaggaatgattgttttgaggtaatggataaggatagagtttgaagggttagtaatttagttagttattggagtagtttttatatgaagtgagaagaaaagttgagatggagtttgtagggtagttggagtttagattttttttaagtttttttttgtttagatattttgttatttgtagtaatatatatagttattgttatttttgggtttagtattgtaagttcggatttattttttttattttttttgtattcgagttttttatttttttgttttgtttaggttttagggagaaggtggttatttttgtatatgttttggttttttagtgaagagtatataggagttaaggagtttacgaaagttattgaattttatttttaaattttagttgattgtgaggttattttatatgttttatgtttttaaaatatatagataaggggaagggttatattattgagggtagagaagaagtttaattttggaatgagaattggaagggataaatatttaaattatattaatgacggtaatgaacgaaggatatttgtttatattgtgtatattgttttttgaaaggattttaaaaattaaggtaaattttttaaaatgatttttgttgaatatttgatagtagtatttttttttttttgaattttttaattttttggtttatgtgatagtatatttttttaatttttttgtttttttgtttttttatttttgttaaatatttttttttggatgttttgttaattatgtatttttgtattaattttgtttttttaagatattttattaaaatatganttattattgagtttttttggtattttttaaattttgtatttaagttaggtgtattttttatattattttagttttagtttttttttttatttttttttttaatatttgatattttatatttattttattttgttataaattattatagatataattataaatgtgtgtgaattaagaaaaataaataagaatttgttttattggatattaatatatattataatgttatagtaattaaaatattaggatattggtataagaagagataaatagaatagtggaataagatggaatttagatataggtttatttataatgggagtttttagtatagtaaaggagatattattaatttatggggaaaaggtgaattatttagtagttgtgggaatatattggtttattatataaagaaaaataaaatatgatttttattaaatataaagatgaattttagatgaattaaagtagtaaatgtgaaatttaaaattgtaggagatgttttaagagtatttttgatattttagtatagggaagattttttttaaaaaagatatataaataaaaatatagttgatggattttattataaaatattaaggatttttttttaataaaggaaattaaggagatagttgttagaagttagattagaggaaaatatttgtaatgtttaaaattgataagggattattagtaggattatataaggattatttgtaaattaataagaaaatgatggaagtatatagtataaaaatggataatgaatgtgaataggtaatttatagaaaaggaatttttaagtggttaattagttttaattatagttttaattattagtaattaaagaaatgtaaaataaaatagtatatttttttatgtatatgaaattggtaaaagttagaaaattggataatgtttagtgttgaagtttatttaggagttgtaggataattagagtattgataaaggaagtttagatgagtatagttattttgatgagaagatgagtagtgtttagttaaattaaggagttgtatttttagtaattttgtaatttttttttaggatatatatattttagggatgtaggttaggtttatatgtatatgtagttttatgtgagatataagtattgtttgtaatagtagagaattaggaatgatttaggtattttaggagtaatgtagatatgtggattaatatgatttggatatttgttatttttaagttttatgttgaaaattgatttttagtgttgtaggtggggtttggtgggaggtatttgaattatggaggagatttttatgaatggttttgtttttttttcgggtaatgagtgagtttttattttattagtgtatatgaaatttggttgttaaaaagaggttggtatttttttttatgtttttttttttttttatgattatgtgatgtattggttttatttgttttttattatgagtaaaagtttttagaattttttaatagaagtagatgttagtgttatgtttcgcgtatagtttgtagatttgtgagttatttaaagttttttttttcgtaaattaggtaattttagatatttttttatagtaatgtaaaatggattaatgtatggatatataaagtaaaatattatggaagatttggaagaaataaattggatgtataaaattagatttataatttaatgttattttggttaattaaaaatatatgtatattggatattattatatattatagaggatttatgtaaataaaaggaaatattaaatttattaaaatgtttatttatgaggtaggggtaagaggttagatatgggagtaaggattggagataaaagggattaaataaattaagggagagagagagagttcggaggtattaatgatgattatataatgaattgagaagtttttaattttttgtatttgaggtttagtatgaataataataataataatgaattagatgtggttatttgtatggaagtttattgtttaatgttaagagaatttttaaaatatataaaaatataaagtatggtgagtgttatgataaatagaaatttgtaagatttttggaggggtattttttgtgtgaatattgttatggaatgagtttaagtagagatagtaagtagttataggtatttattatattgtgttgtaattatgtatagaaatatagatttgattttattatttggtaatggattttggagaatttgaatttggtttttttttttataaaatagggtgaataggatagtggataaatagttttggatttagattttttggattggaagttagttttattattttatagttgtgggaatttgattaaagtgtttaaagtttttgtgtatgtaaaaagatgtaagtattttttatgtgaaatagtgaaaataatagtatttattttaaagattatgtgtgagaataaagtgagttaataaatgtaaatttttagaatagcgtttgattatattaattatttagttagttatcggtgttgttgttgttatgtggttgaatgtttttaatttattagaagattaatgaatatttattagattgaatttttttttttttttttatattttataaattttagggttttttttttatatttttatttttatagtattttatagggttttttgggttcgggggttatggttagaacgtagagattttatgatgaggacggtgtttacgatgatgtcgattaggtttagtattaggtttagggtatagagtatagttttcgttgttttaggtatttggattggtttttgggtttttgggggaagaatgaagagatagggttaggaggtgtagtgagggtggtgatggtttgggatggttgtgggaattgaaggttatggattagttaattggatgttaggacgaggagaggattgagatttagttagtgcggaaagttggtgtagaggatattaggtttttggaatagaggatgttaggagattatggagagaaaagtagttgtatattttagtgtttgaggagcggttggtttaagttttagtgttttattttgtagttatagaagttttttgttgagggtataaaggttaggtaatggaatttgtggaagttgtaatttgttttgggtaggaagaggtttttagcgatatttttagtgattagtttttcgttgtatagttacgtgacgttgagtattggtgggaagaatttgttaatgtggtagatgagggtgttgggttggtttagttttataggttttttgggaaatacggttattttagggggatttggaaggagatagtattaggttaggttttttttttgggatgaattataaaggttttattttttaggggagggtggttttttattttagttttagattttatggtagttttgaattatagagaggggtattatattattgattagttttattttgtttattttttttttttttgagaagagaggatgtaagtttttgttgtagtgggattagtttatggttattaggggaagaggattatatagtagggggtatttaggttttttagtttgagggtggtagagaggtttttttattttttttagttgggttatagaggaagaggtaaagatagggcgtatcgttggtggtttgagtgtggttggaacgttggattaaggtatttaagttgttgtttaatatagtaatgttagttagttcgttttgagttttaaaggaaaaggtttggttaaatttttttagatgttagacggttttttttttgtttagatttatatagaatattttatttttattaaatttaaatataaatttttttgttggtttatgcgtttgtataaacgcggtataagttgatatatggttcgttgtataaagatagtagagaaaaatacgataaaatgttagtttgaatatgtaagtggttaaagttagagaatgaataaagatttatgaatataaaaaggaagaaggtaagaggttaaaggaaggatatatggggaagaagaaggagtaatattataaaggaaataatatagagtagatgagtagttataaaaagaaaggagtaaagaataaaatgaaaagtttattattgataagttaagttgttttttggtttttgaaagtttgggtattttgattttatataatagtaatagtaataatgatagttaatatttgttgagtatttatttgtgttaggtatttttttaaatattttatatattttattcgttgaattgttataataattttatgaagtaaatatatattatatattttataggtaaggaaatgtagggaagttatatattaataatttgttaaggttatacggttattggcggaattagtagagaggtttttttttttattaagattttaatttttttatgatatagatgtaaaattgtttttagagttatgggggtgggggaatggatatttttttttttttattatagaaaaggtagaaaaaaatataaaattgagaggaagaagaaaatattttttaaattttagggtttttgatagttttaaagtttttgttttagtttatgaatatgaaattgtagaatgtatagttttgttgataatattttttatttggggtatataaatttaaaagtatagtatagttattttggtatttgttttaaatttttgttttttttttaaaaatattttaatatttattttatgtttaggagtatatgtgtaggtttgttgtataggtaaatttatgatttgggggtttagtgtatagattattttattatataggtattaagtattttaaattttttttatatttatattttgatttttgttttagaggttaattagaaattattgttgagtttggaatatttgtaggatttaatttattttgttttttagtttttattagtttgtaagaattagtaaagataagaggataaaagtaattattattatgaaagaaaacgatgaatgtgtatgtgaaagtttgggtttagaatgataaatgtattagagtgagaaggaattacgggatttttttgtttttattttttaatttatagatttttttgtgagtttttagttttgatatgtggggatttagtttgtgtttggttatttatagtgataggagaatgattttttgttattgtaattgtaagtgtttagagggtatgatttgtgttttattttttattgagaatgattttttgatatagtaagtggttaagtaaagagtggtatttgaaattaaataaaataaattttataggtattttattaggaaatttagtttgttttttagtttaaaggatttaaaggatttattaggaaaaagagggtaaaataaaaagatataaagttttttagtagttattggaaatttatttttttaatatatgaatgttttttgtattttttaaaatgttttttaaaaaatatttttataagttttgtagtttaaagattagttagttatggaatagattatttttttttaaaatattatttttatttagataaaaatatgtattaaaagattattatatgttaaatattgttagatgttaaatatttaaataaaaataatatatacgttttgttttgtagacgcgtataagttatagaaggaaatataagtgataggataatagtaggtttagaaggataagtgtagatacgtaggtatatataagatgcgattaaatagtatattagggaaggttttttggggaatagatggttttaatgtaggtatttagaaaatagggtaaaagttattttttttagggaagatagtttgatcgggagaagatattgagtttattgtggggttattgtatttagaagatttgaaagttatttaaggagaaataatatatagatatttgtggattatgggtggttttaggagaggaatttaggttatagaattgagagttattagtggtaggtgtaggttaaataagattttttaggaagagtgttaaaaattagaattgtcgagattttagggtataatgagagaatatgatagttaagaggtggtttaaaagatgataaggaggatttaggtaaataggagaaaaataaggatagggtagtttattagaaagaagtggattatagtgtaaatgttattagtaatttaagttagaggtattgagaagaatttattgaatttgattttttgtagaggtttttgatggttaagatgagaggatttttagggatgtattagagataagttagaagtttagttttacgtgtgaggatataaagaaagtgtttttgggataggatgtagattgaaggtaaggttgttttttattagttggtttgtatttatgtttttaaggtaaatgatatgtttaaatgttaagagattgggtagggaagttttgaagagatagttgagtttattaggaatttttattaagaatattaaaaagtatttgtatttatgaagagaagtttattgtggtgtttattataatataatattagaaataatttaggtgatcgcgaatagggtaatagatatttttggttttatttagtttgattttttttttattttatatattttaaataaaattgtttgaagttagtgtgtattttgtacgttatggattttaattttttttattattagattttggaatgatagtattatgtataggtttgatgttattttttttgattttagttataggaaaaaggagtatttattacggtttatttttggttgagtttttgtagttattaaaagtttaggttttttttgtagttttgaattttttagaattcgaattataaggttattaagattatgtaattttgttgttttgagagaggaaagtttgtgattatttataaagatttaggaagagttttagggttttagaagagagggaggatatagaaatattttttgtatttcgttttttaatgtagagtttatagttcggagtttttgtaaagtagttataaaagatagaggttggggattttagagagataggagggttttgatagtaggttattgtgtgtaggaatttggggaaggtagtgtatgatttttagagttgggtttggattttaaatttggttcgttgatttgttgtgtaattttggaaaatttatttatttttttgagttttagtttttttaaaataatttttaaataaaaggaataatttttaaatgaatggaatattatttttattgaagatttttgtgagatgtaaatggggaaagaaattatgtaggagttttataaattttggttgttattgttgttattattatgagggttagagggaatatagattatgaggattagatagattaatgagtttttaaaatttgtgatttttgaagtagtaattgatgtgaattattttattatttatttcgacgtttttgcgtttttttgagtatttatttttgatggttttagtttttcggagatttagtaggaaagttaaggagagggtttttaagattatagttttgatatggaatattttgtttttagggcgtatgttgtggggtttataattgatgattgtgagtataggaatagtgatgaggaattgaggtcgagtggaggtagatgagattgaaattgtgggtttttagtattggaaatgggtggagaggaattagtatggttgggatttatttattagagaaattatagagttgatattttttgttgttgggtaaagaggacgttggaaggtgttggggaagagatgggagaattttaggtattagcgtggttaagagagttttagtttatagtttatttttagagttagagaaagagatgtaaaaagataagttatatttttttttgacggtaaatgttttttattatgttttttttttcgagttttatttttattttagatagttagatgatttttgatgttttttggttattatattttaaattatgttttatgttatgttgttaatattttataaaaatattttgttgataattaagaatgaatgtgttatttaataaaatatataattaattttttttttaggtttatttttttgagatattttttttttatttaattatttttgtagaagtgttataatttttatttagaggttttaattaatttgaatgaagttgatttttaattgtttatttatttttggttatttttgttagtgaaatttttagataatttttattttttagattttttagtatttgattttttttggtatttaaatagtgtaataatatttttatttttaaattattagttttgttattttatttttatataagaatatttaggatagtattatttgtggtaataatgtgcgtttatattttgattttgtttttaagaagggtttttttaatgtttttttgttataggtaatgttaattttttattttatattttttttattatatttaagaaatatttttttagttttattttaaatattttaattttgagttatttatttgatatttatagagaaggttataaaatatttattatttaatgtaatgatgaagtatatatattacgttaatattttattttatttgtggtagttttattttgtataaataataattattaatagattaggatatgagagattttgttattagtgttttgtatgtattattttatttaaattttatattaaatttgagggaggtattattaatgtttattgtaaaaataaattatttgagatatcgaggaagtatttgtttaattatttatggtaggtaaatgataaggagaaaagttttatttaggtagttattaaaaaaattgagtttttttttataatttttttttggttttttaattttattagatattttttattatataattattttttttttttgtattttatatgttagttttttatttatattttaatattgatttaaagaaatgatgttaatttgattttttttgaaattagaattggtggtttaataggattatatttataagtgtttaaagtaagaagtaatgttttttgaaagtttgtaaaaatatttattttaaataaaatagaattagatgttttgaaggaggtggggtttttgatgatttttttttatttttttttttatttattagttaatttatattttttatggattttatttttttaaagtaattttagatttattgattttatttgattttaagagttttgttataaggtaggttatattatttttatattgaagataaggaatcgaagtttaagagaggtagtgtcgttaaagttgtatatttatatggtagggtaggtggtgtgtttacgtttttagtgtaaggtttttagattgagtttttttgattttgatgatagttttgtggaagaatttggtaatttttgtatatcgtaggatttatagatttttgggagaaagtaaatatgaatgggtgttaattttaaatatatttttggataaaggtaagatagatagatttagattttatttgagttttgagatgggtattttaatttttttaagttatgttattgaatgattttttatatattaagatagtattttttttataatagattatgttttgtgggtgtgtgaggtgtggtagaattggggaaatgataatttttgtagatgggttagtagaatatttgagattatttttagagtaaagaaaacgtataatttttttaaatattatgatttatttgattggttaaaatgagtattattgtttttttttcgttattttaagtgtattataggttttatatttttagattttttatattaattttttgtttagtgagtaatgatttatataaagtttagtgtttattggttttttttttagattttgtttaattttagggttatagaagattatttgggtttatggtttttaatattttaaataggagttttttttagcgagtttttttttttttgattgtagttttttttattttgttatttttttttagttttatgatggttttgtaggtttttgcggtttttcggatagtggttttgacggcgttattgatggtgttgtttatatttgtggtttagggtagggttattttaggtaagagtcgaattgttatttttggagggtttggtttagggaataatttttaggggacgttatttttaagggattaaattttgagataggttgcgggggtttttgttttaaggtagtgttttttttttttagttagagaaagaggtttattttttataggatagtttgttattttattggtttattttttttttaaggatatgggtatagtaaatagagagaggtgtttagtggttagtatgtttgtttttggggaaaatgggattaagaggttttggataattttggatagataaggtttgtagagagagaagttggtaagtgtaggtttttgggcgtgtttatgtttgtatttagtttggaggggatttaggtagagagttttaagttggagtgtttaggttttgaggattattgaggatttagtgtttacgaagaatgttttttattttttagggtggagtaggagtttatattttttggataattaaggagagaagggagggagggggataggttttagtttttgaaggtatttttattaaaggtattttttttagtttttttagaatttggttagggtattagagtgggttgcgatttgtaggaagaatgagatgaggttgtgtgggtgtatgatagggattgagtgtaggttattagatagttaaggaagtagtaattaagtgaaaaattttttttttttgttgtttttttgtggttggtgtaatattatggtatttatgatttattgttttttttttaggatatttttaggatatttttttttatatatatatatattttaagttttagggtatatgtgtataacgtgtaggtttgttatatatgtatatatgtgttatgttggtgtgttgtatttattaattcgttatttatattaggtatattttttaatgttattttttttttttttttttattttataataggtttcggtgtatgatgtttttttttttgtgtttatgtgtttttattgtttagtttttatttatgagtgagaatatgtggtttttggttttttgtttttgtaatagtttgttgtgaatgatggtttttagttttttttatgtttttataaaggatatgaatttatttttttttatggttgtatagtattttatggtgtatatgtgtgtatttttttaatttagtttattattgatggatagttgggttggttttaagtttttgttattgtgaatagtgtcgttataaatatatgtgtgtatgtgtttttatagtagtatgatttataattttttgggtatatatttagtaatgggatggttgggttaaatggtatttttagttttagatttttgaggaattgttatattgttttgagatattattttatattagttaaaatggcgattattaaaaagttaggaaataataggtgttggagaggatgtggagaaataggaatatttttattttgttggtgggattgtaaattagtttaattattgtatttttaggatatttttagtttaaatttatattaatattttgagaggaaggattgtaaagtaggtattttagttttttattgatttttattttttttgtttatatttttttttttagatttttttatattttttttaggatatatttaaaaggtattgatattatgttatttttttattttttagggtagtaaggttggaattttttgaatatagttttttaagttttaaaattttttatttattattttgggtttattgtttaggaaggggaggagaatttgaatttgtagttatagaagggtgttgagaattaattagtaggacggtttagttttgggaattgtagaggggtgaggttggggagagaggaggttggagtagtattggtgatattgaatagtgttaggaggaagtgacggatgtagcgtttttattttataggtagagttgttatgtgggatgagggatagtgttgggagttattaaggaaatttagaggtgggggagtagagagtagaagggagtatgtgatgttggatagtgaaagggaggataggtaaaggttgggttgaggtttgtagggggaatgagatgaggtagtggagttatgtgatagggattgagggtagattattggagttttttgcgtagaatgaatgtttaattaaaatttgttggagggagagttggagttataggggagtgggtaaagtgggtagggttgattttataattttttgtatgtttttttaattttatatatatttttaattttaaatagggtataagattaaagggttgaggagttaggttatagtttaaagaggttgggggagaaaagtttggttgagataatttatagggagttagaggtttttaatatattttattttgaataagagacgaatttatttagattagtggttttaaatcgtgttttgggtaatttaattgttaagggttttataaataggataaagttttttatatataaaaaaaaatgaaggttttaaattatattataaaattttttattgtttatgtttatttggtaggtaaaattttattttaaaagttaaatgtatttaaaaaattatttaagattgggtaaattaaaaaaattaaatgttgtaaagaaaaaatttaaaatttttatttttgaatgaaaaacgtttttttattggtgattgaggaggagaaataaagattaataaatgaaaatgggagaatttatatttagagtggggtaattgaataggtaggggcggatggatggtagaggaggaggaatttggattaaggagttggggggttttgggtttggaattttagggtttggggtttaatattaggagagaggtaggttaggatatttgagttaagatttgggattttgttttagtaatgatattggagattaaaggtggattttatggtgtttttgagtttagttttattttatttttattattttttgttattagttgtgtaatttttgttaggggtgaggttaataaattggagaagttaatttgtggagtatgaaatagatgagtagaataattatagtattttaatttttttagtgtgtttaagaatagagtaggtttgaagatatttaaatagaaataaatatgtgtcgtgttattgataattttgtgtagatatatatttgttagatattgtttatggtattttttaggaagaatagtatgtgggaaaggttgttaaaattgtttatgtaaaaattatattaatgttgtttttttcggtgttgtttatgtagttggtagttatttttttttttatattatggttttttttagattttttatgaaggataagatttttaaaaagaggattaataagtttatgaggtattaattagattgaaatgttaaaattaagtataattggcggaaatttagaggttttaatagtagggttcgtagaaggtttaagggttagattttgatgtttaatattgtttatgggagtaataataataataaaaaaaatatgttgtttagtggtttttagaagtttttggtttatagttttaaggagttgaaagtgttgttgatgtgtaataaattttattgtgttgagatcgtttataaaattttttttagaattgtaaagttattatggaaagagttatttagtcggttattagagttattaattttagtattagggtgtatagttaagaaaatgagtagaaagtttatgtttacgttttgtgtgtaaataaaattataaaaattgttaaaaaaaattatattaatgtttttaaatttaaaggattttatttttataggtttttggttgttgtggtgatttttattgtgtaaaatattttttatattttttgatattaagtttttttgtagttatgtttgaaaattaatttttaggttatagagttttttttatattaaagttgaagaaagttttaagaaatatatttttatattttttatatgtaaaataataggagtaagttgaggaatttttaagaaattggtcgagaagagagagcgtttagttatggaaaagagaaagaaggaagggagggttttttggaggaggtggtatttgaattaggattgatattaggatggaaatgttagttagggagttaagtagggggagtagtttcgttttttacgtttttagtttttttcgtttttgtttttttttttagtgattttacgtgaaacgttttcgttttttttagttattagtagaagggattgttttttttttagtgttcgtttttttttagtgattatttagtgtttttgagtttattttttttagtaaattttttttttgcgtggtgagaaaataggtttggagaggttttgcgattcgtttaggattatagaattcggtattaggaaaatttttattttaaaatttagttttgggtgggaagatttgggaagaatcgttaatattgagagagagagggagaaagaggattagatgagagtggcgttttcgtttatgttcgtttttttttcgtagagaattattttttttagggacggtaggaatgttacgcgtttaatgggatatagcgttttttggagagatatatttataatcgggaggagttcgcgcgtttcgatagcgacgtgggggagtttcgggcggtgacggagttggggcggtttgttgcggagtattggaatagttagaaggatattttggaggagaagcgggtagtgtcggataggatgtgtagatataattacgagttgggcgggtttatgattttgtagcgtcgaggtgagtgagggttttgggtcggcggttttagggtagtttcgcgggttcgtgtttagggcgtaggagtagtcgggttggtttaagggattttagtgtcgggcggaaaggggattttgggttggggatttatggggggagtttatttggagtttgttaggggagcgagcgcggggatttggattgggttgagtatggagtgaggaggacgagagtagagagattttcgggagttttattaggtttggtagttgattgtatgtggggtgaaaaaaggaagttataggatagcgtataagggtatggtgtggagatggaggtggagatggtatagtaggttatatagagaagaaatttatagggaggtagttgggtttgaggtgtttgaggggtagatgggtggtttgatgggtaggtagatagaagggtttgtagtcggggaggagattgagatatatgagattatttagggagaggggatttagggggaagagtaaaggatcggattttgggaattggatagttgtgatttggttaagatagaaaagtttgtgaaagagattaaaaaaatttaagtgtagtgtgaggagaggttcgtagagaagagttttggaagttgaggggaggtgattttagtagtatagtggatagcggtgttagtgatttgggaaggttagaaaatagaagatggaaagtgggtttggaaattagggagatttggggagagtaggttggtcgtagcggtaggagttggaatgggagggggtgtatgaggttgagtgtggcgtatttttttcggggttgagatggattttatttgttttgggttttttacggttgttatagggtagtgttttagtttattcgttttttttttttaggaagtttgggtgtaaagggatggagagaggtgaggtgtgtgtagtaagaggattttttaaggatgggataggaaggttttggagttttggtttttttttgtgaatttgtggggtggggagtttggtgtattaatttgagggatttgagggagtagtattaggatgtgggattgagttttggattttttttttagaaagaggaaaaaaatgaagggaggaggaggaggaagttggggagattatatttttgatttttttgtttttggaaagtgaaaggaagtttatttgttatgagtgagaaggtggatatattgggtggggatgaggtgagtgatatgagtttaggaaagttgttgaggtaattggttgagagaggtgtttaaataaaaataacgtaattggtaaaaattgttattaagattttgtagaggtattaattagtgatatggtagtatttttttttatagtaattaattgttagattgtagatagttttgatgttagtttaaggagtgtgggttttttttttaggttcgtaggtttttaattttatttttttgaagatttttttggagattttttgtgatgtatagatttttagatttagtgtttttagatttagattttttgggtggggaggtttggggatttttgtttgtaattagttttttagaggtttttatgtagttagataagtattgttagaatattgaagatttttgaaaaatgaaaaagagaaggttggagatgtgtttttagaagattattaagggtgttggttagaggagggattagaggtagggagatgaggtaggaaattgttattatttgttagggaaattgtaattaaggtatgagttagaatagggaaaatatagaggtaagggagaggtggaagggggaggaaagaagtagtgataattttagggtggatgtttatttaaatttagaagtaattgagtaaatgttttttgggtattagagaaggtaattagaataaataggaatttttgttttggtgaaatgtatttgaattgggttagaaatgaggttattgggtattaggttttaattttagcgtattttggaggttattgatgtggttttaggttgatttgtttttgttaaagaatattgagtaagatgtttttcgtggaatgttttgggattttaaaatagatatttaagtattttttttgattttatggtttttagaagttttatggggaagaaattgtaggtaatttataattgagatttagatataagttgaatagtgtaatggatattgagttaatcgaggtaatgaagtagtgagatataggtgtttttgaaataaatttatattgagggaagaggttgataatgtggattagtttgaaaataaggtaaaaatataatagggagtaagggttgtgtgttagtttaagattgtatttttatttggtttagcgttatgttagggtatttgtgttttttaggaagtagaaaggaaagaattgagtgattagggatttagaagattaatttgagatattttttttgatgagttgttttttagggtagttttttgaaagagttgttttttagtggatttttttgaatgaattgttttttaggagtatttgatttttttttgtgtttgttttttgttttgtgtttgtgtttgtttttgagataggtttttattttgttttttaggttggagtgttgtggtattattatggtttattgtagttttaattttttgggtttaagtgatttttttgttttagttttttatgtagttagaattatagatatacgtattattatgtttggttaatttatttttttttttagagatgggtttttattatgttgtttaggtcggttttaaaattttgggtttaagtgatttttatgttttaattttttaaagtgttaagattataggtatgattattatgtttggttttttttgttttttgaggaggaaaaaggtattggtggtagagatttaaaagaaaagttgttagtggtagtgtggaaatttatttgagaataataggataagttggggtataaatgtaaagatgtagagggaggtaatatttggttatttgtgagatttttatgggatttgaagacgtagtatagaggaggaatttgaaaaaggacgggatttttattatttaagtatgtaggagtttaggatattttgtaaatatgaagattttgagtttttgtaggtgaggtaaaaaaatatataggttttttatagaataagatatgtaaagttttttttattttttttgtatttttatgaagttattagatttataggttattataatgttattgtttgtatattttaattttaagatattatttgagtaaattttgttttttttgtattaagatagaattttgaaaaggtaggtaattttatagttgattaaatattttttgtttaaattatttttggttaaaattttttttaaatgtgttatagagtgtaaattttgtttttttgttatttcgttatatatttattaattattattttatttaagattatgtatgttttatttgaaggtttatttttatttttttaatgttatttttatttattagtttaattatattatttttatttttaatatttaggaattaattatatagtgaatatgtttaagaaataataatttgggtagatgtagtggtttaggttcgtaattttagttttttgagaggtcgagcgggtggattatttgaggttaggcgttggttaagtgtttttagagaattaggttgattaatatggagaaattttgtttttattaataatataaaaattagttaggtgaagtggtaggtatttataattttagttattcgggaggttgaggaaggagaattggttgaagtttagaggtggaggttgtagtgagttaatattgcgttattgtattttagatttggtaatagagtgatattttattttaataaaaagaaagaatgaaagaaagaaagagcgagattatgttttaaaaaaaaggaaggaaggaaggaaggaaggaaggaaggaaggaaggaaggaaagaaggataattttaaattttattttattattttttttttacgtttttagtttagtttagggtgaatgtttttttttttaagaaggggtttttgtagtattataatttgtttgtttgttacgtgacggatttttatttaggtagtatttaagttcgatggtttttgaatggataggaggaaatagttggggtcgtgtttattaatttgattcgtaatggagattggattttttagattttggtgatgttggaaatgattttttagtagggagatgtttatatttgttaagtggagtatattagtttggatagttttgttatcgtggagtggagtgagtttttgatgattttttagattttatttttgaagagtaggggattttttggttttggggtttatttattttattttttgtatttatattttggggttatgtttaaattttattttttttttatattagtttttgagtatagtttgaagttagggaaatggagattttttgattttggtttaggggtttttgaagatttatagtttttttttttgttagagaatttagggatattgattggtttcgaaatttttatatttaggaattgattttatatataggaatagttttttttttttagtattttagtttttttttaggtattttgagaggtaatttttagaattagtatttgttattttgttgaggttatatttttgttttagatatgagggtggttttttttgaatttttttttagtaagtttttttcgttgtattgtttttatttcgatatgttgtattaggttttagaattttagataggatatgagtagggatgtagttggtggaggtgatattaaatttgggtttgttttttttagaggtatagtttgattttgttcggagtaagatattgacgggagttgggggtttcgtgttggggtttattatttgtggagtgggtatttttatgtataggaggagtaagaaaggtgagaaagtttgtagggtgagcgggatttatttttttttggtatatttatatttattttacgatgaggggtttgatagaaaagaaatgttagaaagttttagaggttattgatattagataatcggggaataaatatgatttatagcgagagagggattttaggttgggattttaatgtagttagatgtatgaggttttaagtatttaggtttttgcggagcgtttattgagtgatgggtaatggaatttggtgggatggaaatgtttttttaattatttgaggtggttttaatggttgattatataatttttcgttttttattttagtttaacgaggatttgtataaataggtaatatttttgttttgatttttttgtggggtgggttgtaggaggatatgagttttttttgtgtattgtaatattgaggtttttttaggaagggaattttaggtatgaattttttttttaatgttagtttttaggtaagtggggaaagagtattgtttggttttattgttgaaggaagtagagattaattttgttatttattagtttgagacgtatttttttattataattttttttttttggatttataggaaggaggttggtaatttgggataatttgttttttatttttatagggtttttgagtttattgaaaagattattgtgttttaggaaaagtatttgttgtgtttcgttagtatttggttttaggatagatttttaatttttaaattggatattgttgttaagaagttgttttgaagttagtttttattattttgttttttgatttaaagtattgttttttttattgggtttttaattatgtttttttttttttagtattataaataattaaaatttaatatgattgtttgtttttttttaaaaatatgtattaaattattttttattatttttttttgagggttttagtagatagtaggagttaataaagaagtttattttggtttaaatataggaaagaagagaattatgaaaatggggatatgttaattattgtataatggggtttgttatatatgatatttttttgaattgattgtattttagtgagttgtttttaaattaagtttagtgtttttatttatttatgttttagattattatttttaattatttaatggtgagtagattgtaaatttgtttgataggatttatatttttatagtattaatttaatatatattttattgagagtatgttttattattattattaagaagttaaatgaatattagaatttaaaattataaatataatttaatatattttaattattttttttgtgtgttattataaatattttttaattaaatacggtttggatttttgaatgtatttaatagacgttatttgtcgtttaagtttgtatttatttattagtttaggttttttgttttaattttatatagatagaaatgatttttattggggaaagagtaaagtaatatatgtagtatttttttttaaatattggttttttttttttttttaataatttaatattgttatgtgttttgcgttttatattgatattttttggttaaggtagaggatatgtttgttgtaagttttttttttcgtgtagaggatggattttttatttttgatatatataattagtgtatagtagtttttttatatatttagttgatgtttttagtttttttggttttttataagtattttttgggttttgtgtgtttttgggtatttgtttttggttaattttcgaaagttattgtgttttttttgtttatttttttttgtaaataatattttttatcgggggatcggttttttttaattttaggagaggtggggttgaaggtatagatttgggcgttattggtatagatataagtaaatatagttggagtttgtagagaggttggattgagttagggagttaggaaagagaagttatatataaggataattaattatgttttttataatttttttaatttagggaataggatataattattttttttttttaaaatatttttatttttgattagttttatttttttaaaaattataaaggaaaatgttgttgatttgtttttgcgtagtaattttagttgttatataataagttaaggaagatagtatatagtaaataaggattttttatttgttttatttttttttttggttttataggaaatttgtgagaaatttatgtagtataaaattaatatgattttaatttagggatttaacgatggaaggaggttatgagaatagtagaaagtttttaaatcgagattattatgaaatttttagatttagagtatataaattttatttttagagttattgagtagttaatattataaattataaattatatttagttagagttatttttttttttgtttgttttttgtatttatgttataggttagggtagtatttcgagtggagtgaataatttttggattaatatttgttaggattagaagttgaggtatttgtatttatattataggaataggatatgtgtttttagggaattgagggtgttaggagatgaggaatgtttttggagttatagaaagaaggtattagatgtgttttattttgatatatgtaggtgtttatgaaattttgggatttttaaggaaggatgtagtgtagagataggttttagaggagataagagttgagagattatttaaattgggattattttgttattagattttaaatttttaatattgatagagtgttttttaagagttaggttttttgttgagtgttatgtgtagtaggattaaaggtagttaggaggtagaggagttttgaggtatattagttattggagttgaagagtagagatttaaaggaaagttggaattggagttttaaaggagatgtgaagtgggtgatttaatttttgatttagaaaaattgatatttgtagaagaaaaaattcggcgggtttaggatttttagttgagtgttgtattttttatttttttttatttggtttttttattttttattttttatagttttttaacgagaaggtggtttatttaatagataacgttgttttagatggttattaaggggtattttaagaagaaattattttattttttttttgtttttatttgttaagtagtagtgaggtcgagttaggggatggtgaaagtggaaggaggtgggagttgggtatcgggtgtgaagatgtttttgaaaggggttttaataattatttgttattaggttagtgaatatttattatagttgatgttttttgagtatgttgtattgtaaattgtttttgaaattattgtgtatttggtttatgggatgaaatatttttttagtttttttgttttttagtttttttgaagttttattgagtattttttttttaattttttttatatagtaagaataggattagttgtgttaaattaataaatatttagatatttaggtttggtttatgttatacgtttaaagtaagttatgtaggaagttttgtttattatcgtatttaggaagttaggttgatagttttttttttgtatatttgtttttagaatttttttagtagaatgaagggaatttaagaatttatttattggtttttaatgattttttttagaaagaatatatttttcgtattttattttttaatgtaaattatatggttgtaattaattttaaataagtgggaatatttgaaggtggaaaatatttaagaagtatatattaaataaataataaaatatttttataagagatatttatggaggatttattgtgtattaggagtaatgttaggtattatggatattagtagtttttggtttttgaaaagtttatatattattttttggtttaaggaggggtatagggatgttggtaatagtttatttttttattcgggtattagttatatgggtgtttgcggtgataattatttaacgtatattttattggtttgtgtgttttttttaaatgttttttagtttataatagaaagggtttaaatagagaagtaaaggagaatttgggaatttgaagtaaaagtaagaagttattgaattaagtataaatattgagttttgataaagattggaataagaaatataataaatgagataagaaataggatttttgtaattgaagtgtaattaataaataaaaagttaaattgagaaattgttttaaggataatatgatcgagtaaataatagaaaatgtaaaggataagtgaagagaaatgaaggatagaaatagatatttgatattttaataattagacgtttagaaagttagggaaatagtggaggaagaggaaataattgaaaatataatagatgtttagtttttatagaaagatgaaataagtttatttaaaatgttgtatagaatgttagattgttaaataattttgttagagtaaaatgattgtaaataaatgagttaattatgtgaattaagaggatggaaaagtagaaaaatagtaaaaagaaaatatatgtaaataataaggataaaagttgaatttaatgaaatataaaaatagagaagataaaattaaattttgaggtaatgaaaattttaatgagatttttggtaagatttttaaggaaaatataggagatttagaacgaaaagggtaaatgatatttatatatattttaaaatgtaaaattttacgattaattttatatatataaatttgaaaatttagataaaacggatacgtttttagaaagatataaaggttaaaattataggaagaaatagaaaattaaaatagagtagagaatattaaagaaattgttatgggaagtaaagaatcgttttttaaagggttttgttttgattttattgtagatgagggcgtttttttatatttttaggagtagattatgttttttatacgtgtgattttagaatatagaatggaatagaatttttgagattattttatgaggttggtttatttatatttttagagttagttaagaatagtataggagaataggattgtggattaattttagttatgttattgaatttaatagtatattataaaaataatacgttttgattaattttagatttattttaggaatgtaatgattttttagtgttagaaaatatataatgtggttaatatattagtggatttcgtaaaatttatattaatttaaattgaatttagtttaagatatagatagaatttaattaattttatgatatgttaaaggtagtgaattaaaaatttatagtatatatattttaaagaaatgaggtggattgtttttgagattgtgtaaaagataggatgtttttcgttgttggaaatgtttaatatagtattggaagttttgaatattattttgcgggtagaagaaaattaaggttgtgtaaaatgtaggaagatagatagtgattgtagatgaaataatttaaatattggataagattgtagttattgtaggtttaaagtttgggtttaaatttaagttttgtattttgaagttgtgtggtttttatttttttcggtgtttgatttttgttttgtaatatgaaataaataagaattaatttttagatgtaaataagtgaatatatgagaagtatttagaatagtgtttagaatatagtaagtaatttaatgaatgttattttttattatatttgttaatgtttttatttagtttaatggtagtaaaatattaatgtttaaagagtttttggtgaagtgttttttttttttattttttatttttaatttgttatttcgttttttttattttgtttttaatatatttataggatgatttataggagtttttggattcggggatgttgttagatcgtttggtttttgagataatggtgttattaaggattttcgttaggtttattagtaggtcgagggtatagattagtatttttatggttttaggtatttggattattttatggatttttggggtattaagggaagatagagttataaggtatagagagtaggggttggttttggatgtgggaggtgttgggtattcgaaattatgagatggtgaaatttggataaagtgattataaaatatgggattgaggaaggtaggtgttgaggggcgatgggtttaggaaataaaggtggtgttaaggtcgtgagggtagagggagggcgttttatattttagtgtttgaggagaggttggtgtaggttttagtgttttttttggaggttataggtgttttcggttatgggaacgagggttagatagtggaatttgtgtaatttgagttttttgttgggtaggaagatggtttttgtaatatttttaatgattggttttttattgcgtagttacgtgatgtttagtattggtgggaagaatttgttaatatggtagacgagggtgttgggttggtttagatttataggttttttgggaaagacgtttatttcggtgggggttttaaaaggggatagaatttaaggagtttattgttattggttgatttttaaaggttttattattttaagttttatatttattagattaggggttattttttttaggtttatttttttgtttttttagggtttttggatagggttatagtttttcgtgtttttgatttggtttttttagtttagttttttttttgagtaagaagaaaatgtttttttttttgttgttttaagaatttagttgtgtggatttaagatttttcgtttttagggaaggggtttatttatgagtgggtattatggtttttagttttatgtgtggtagagaggtttttttatttttttagttggattttagaggaataggtagttataggtagtgttatttgtggtttaagtttgtttggattattgattcgggtgtttaagtgtttttttgttatgacgatgttagtaatatttttttgagaggaataggtagttataggtagtgttatttgtggtttaagtttgtttggattattgattcgggtgtttaagtgtttttttgttatgacgatgttagtaatatttttttgagtattaaagttaaaggtgtgaataaattttggtagaggttagattattttttttttatttaggtttacgtagaattgtttttttttattaaatttaaatatatattttttagagggtttgtgcgtttgtataaatttcgtatatgttgatatatggtttgttgtatgaaggagaagatggagaatgggtgaatacgtaggatgttatatagaatgtaggaagtaaataggtaataggaaggttattgggaatatgaaggaataatatagaaaatgagaaatgtaaatgaaagaaaagaaaaggagtgagaagaaataaagatagaaatgatttatggacgatataggttgttttttttgtttttgaagatttaatattcgtttatgataatggtaatgttgaatatagtaagataatatttattgggtatttattatgtgttaaatttatttattgaatttttatatttttatgtagaagaatttattttttatagtagggaattgattttagaggtaaagtaatttgtttaagttatataatttttggtagaaataatattgagtagtttttttattttatttttgtaggattttagaaattttataggataatatattaaaaattattgatatagttataaagtaaggtagggaagtggaaggatggaataaatattttagagtggaataaaatcgtgaaggatatgaaaatatttttagagttttagtgatatttatagattttaagttatatttttatttttagaagaaaaatgatattttttataattttatttataatatttatattttaggtagagtaaatttaaaagtattattatttatataatatttataaaattgttttgtggagtgtagtttttaagtgtagttttatttggaaatataagttgttggtatttgaaagatttatgggatagtattttagttttatttgatatataagaagtagtaattggttgataataaaaagtgaattattattatagtgaattatagagagtttagggttcggtttggaagaggaagtgaagttaaatgatattgtatggttggtggtttttaagtgaggatttttttttttagtttagtatggggagaattagttttttatttagatgtatagtgtgatagtaggtttagtgtcgtatatggatggtgagggttttttattgagtttagggtttagaggattatttatttatagaaatgaattttaaaggaaaaagaaaaatatacggtgtatagattgggttatatagatgtaattggtttagtttaggttattttgtatttattatatttataaaatttgaaaattaaaggttggtatattttgaagtaaattttatattttaaatgttaatttttatttagttaataaatgttttttgtgaatttttattttttaggtaataaggatgaaattttaaagatgggaattttgtttttaatttatttgaaatttaagaataaaatagataaagaaaagatgattgttatatgtgtggtttgattattattgagtattataaggtatatataagagttatttaggagtaaaattaaaatacgatttaggaaaggtttttagggatagtgtttatttgtagatagtaaaatagagaaaggggaaatggtatttttagtaggagaagtaggtttaggagtagagaggtatgaagttgtaaggagaattgtagttttttagtgtgattgaagttaggggagatgtgggttaggtagtattgtaatttgttttgtgtgttgatggtaagtgtttgtattttattttataggatataggaagttgtgaagtattttaagtaggagagtaatacggttagatttgtgtttggatggggtatttgtaggaaggatgggttggaggaggcgggatttaaggtaagattagtagtatttttaagtttttggtgggaagtaatgaaggcgtaggttagggtaggaatatggggtgaggaggatagtagatggatttgatggtagtaatgatatgagaggttataggaattattaaattatatgttagaagtagggatatgaagaagtcgagaataattacgtaacgtggagaattgtggtattcgtgtttgtaaaggtgataattaagtgattgagagaaggtaaaattttttgtttgagatatattgaatttaaatttttaggggaaaatatatagttgatttgaaggtagtgaaataaatggatgagtgttatgttatattaggttagtgatataaattggaaggaggtttatggtgggtgaagttttaattttgggttaggttatttaagaaaagtatataaagttaggatagtagggatttgagtgtgtgtttttgtatttagataaatatagatatgaagaaagaggttgaaaagtagaggattagaaattggtaggaaaatagagaggaagtgggtttataaaagataagagataggagaaaatttttaggaaagaggagagggggtattttaaatatattaatgatatatataagatagaaatagaatagtgattattggtttgagttgtataaaagttattagttgttattttgagaggagtattagagatgagggaaagaaaaagagagagtatattgggttgaggattgaatgaaatgggagaaaatcgataataggttgggtatagtggtttatatttgtaattttagtgatttgagaggtcgagataggaggattatttgaggttaggagtttgaaagtagtttaggaaatatagtgagagtttatttttaagaaaataattttggattttttgttttttatgagtaatatagtaaatataagttttgtagatgtgtttagatttgagtttgatttattgaagagagtgtggtgttgttaggttttagatattagattataattaatttttttttaggttttgtataggagaggtttattttgtggggtatatagtgtttaggggtggtataggttttgtagagattatagattgtttatttgataagaaatattttgaggaatttattttatagattttttaagaaaggaattattgtaggagaatatttagaaaatcgaaagaatttatagatttttttaaagaagggaggggttattgtaaattttattagataagtgaaaaattgtgcgtttttaaagcgtgagaggggaaaaatttgttttcggatttatgtttttattggggaattcgaaaatttagattataggaaaaggatttaattttatttagatttgaaatagatttagtatgaaatataaaagtacgtcgggcgttgtcgtttatatttgtaatttcggtattttgggaggtcgaggcgggcggattataaggttaggagattgagattattttggttaatacgatgaaatttcgtttttattaaaaatataaaataattagttaggcgtggtggcgggcgtttgtagtgttagttattaggaaggttgaggtaggagaatggtataaattcggaaggcggagtttgtagtgaatcgagatcgcgttattgtattttagtttgggtgatagagtgagatttcgtcgtaataaaaagaaaaaaaatatatatatatatggtagatgtagtagtgagaagagttttgtaggtacgtttagtttttagtttaagtttagggaagttatttttgattatattttataagggttttgggggaaggtagacggtaaaatttggaaggggttatagtgtgaaaggagcgtttaattgaaatttgttataattttgattgggtataaattttttggagtagaatttggggacgaacggaattgttggagaaagagtagaagttattgttaatattgtgggtagatagggaggtatatggtttgaaagttgtgtttgtttttttagtaggaaatttatagtttggagtgaggtttgagtttattttgaaggttgtagggagataaatttaatgttgttagtgtggtatagtaggagtaaaatttgtttcgttaattgtatgggagttgggtgaagtttattgttattaggttttttttatttttttggtgatagaggtagttataatgttttttggaatataattttattggttggagaaaaattttttattttattttttatagtggttgtcgtaagtttttcgttcgaggagagtttgagtttagatttgtttaattttgtttatatttgagggtatttttttatttatttggtagttaattataaaagacgtaaatttttgggagttttatgatattatttattgtttgagaaattgaatatttattttggttaatttagggtaagtttatatttattttttattattgtagttggtgtttttttgaaagtattatattttggttggaggttaattaatttaggatattataataatttacgatagaataattgttttaagaaaggagaaaatagttaattttattggttgaaaaattttgattaattagtggttttcggtttgtttatatgataattgtattgttagtataattagtatttgagaaagttattatattaagtttatttataattaaggatttttatagagtttattttatttttttattatttttatattggattttagtaatagatttaaattaagaagaaatttttgaattgttagatagagaatttagaaggttgattttaagttatttaaaaagatattagagaaaggtgaaaaataatttaaataaattttttaaaaatataggatatggattaaaaatgttttagggacgtagatattataaagaagaaataatttaatttttggaaatgaaagatatatttagagaaatataaaatgtattggaaagttttaataataggatttaataagtagaagaaagaattttatagtttaaataataagtttttcgaattaatttagttagataaagataaagaaaaaagaattttaataaataaataaagtttttaagaaatttgggattatgttaaatgatttaagaatgattggtatttttgaggaagaataaaaatttaaaagtttggaaaatatatttgagggaataattaaggaaaatttttttggtttcgttagagatttatataattaaatataagaagtttaaagattatttgggaaatttattatagaaagattatcgtttaggtatatagttattaggttatttaaagttaggataaaggaaagaattttaagagttgtgaggtaaaagtattaggtaatttataaaggaaaatttattagattaatagtagtttataagttagaaaagattggggttttatttttagtttttttaaataaaataatttttaggtaagaattttgtatttagtaaaattaagcgttataaatgaaggagagataaagttttttttagataaataaatgttgagagattttatcgttattaatttagtattatataaaatgttaaaaggagttttaagtttttaaataaaattttaaaatatattaaaatagaatttttttaaagtataaattttatagggtttataaaatagtaatgtaaaggaaaaaaataaggaatttaggtaataattagtatgagaaatagaatagtattttatattttaatattaatattttttatttaaaagatatagaatggtaggaaggataaaaatttagtaattaagtatttttagtttttaagagttatttaatgtgtaaggatttataaaaatttaaggtaaaggagtggaaaaagatattttatataaatggaaaataaaagtaagtaggagtagttatttttatattagttaaaatagattttaaagtaataatagttaaaaaagataaagagggatattatataatgataaaaggataattttaataggaaaatattataattttaaatatatatgtatttaatatgggagtttttaaatttataaaataattattattagatatgagaaatgagatagatagtaatataataatagtggggattttaatattttattgatagtattagaaagttattaagatagaaagttaataatgagataatggatttaagttatattagaagaaataaatttaatagatatttatagaatattttatttaataattgtagaatatatattttttttattagtatatgaaatattttttaagatagattatataataggttataaaataagttttaataaatttaaggtaattaaaattatattaagtttttttttagattatagtggaataaaattggaaattaattttaaaagaaatttttaaaattatataaatatatggaaattaaataatttgtttttgaatgatttttgggttaatagtgaaattaagatgtaaaattttttgaattgaatgataatagtgatataatttgtgaaaattattcggatatagtaaaaatagttttaagaggaaagtttatagtattaaatgtttatattaaaaagtttgaaagagtataaatataaaatgtaaagttatattttaaggaattagagaaataagaataaattaaatttaaatttagtagaagaaaagaaataataaagagagtagaagtaaatgaaattgaaataaaaaaatataaaagataaatgaaatatgaagttgattttttgaaacgatatataaaattgatagattattagtgagattaattaagaaaagagaggatttaaataattttaattagaaataaaatggaagaaaatgttattgatattatagaaatataaaatattatttaaggttaatatgaatatatttataggtataaattagaaaatttagagaagatagatttttggaaatatataatttttttagaataaattaggaagaaatagaaattgtgaatagattaataaaaagtagaaagattgaaatggtaatttttaaaaaattgttaacgataaaaaattatagatttatatggatttatagttgaatttaattagatatttaaagaagagaattggtattaattttattgaaattattttaaaatagagaaggagagaattttttttaaattattttatgaagttaggatcgttttaatattaaaattaggaaaggatataataaaaaagaaaattatagattaatatttttgatgaaaatagatgtaaaaatttttaataaaatataagttaatataatttaatagtatattaaaaagattatatatggtgataaattgggttttatgttagggatgtaaggatgatttaatatatataagttaataaatgtgatagattatataaatagatttgaaaataaaaattatatgattttaatagatgtagaaaaagtatttgataaaatttattatcgtttttttattaaaatttttagtaaatttgatatataaagattataatttaaggtaataaaaattatttatgataaatttatagtcgattttatattgaacggggaaaagtttaaagtatattttttgagaattggaataagataaggatgtttatttttattatttttatttaatatagtattggaaattttagttagagtaattagataaattagtaaataggaagttaaattgttattgtttattaatgatatgattgtatatttagaaaattataaatatttatttaaaaagtttttagatttgataaatgaatttagtaaagttttaggatataaaattaatgtatataaatttgtagtattgttatatattaatagtgattaagttgagaattaaattaagaatttaattttttttatagtagttgtaaaaaaataaaatatttaggaatatatttaattaaggaggtttattgggggaattagtttttaatattttaaagtatgtttttttttattttttttaagtgtgggttagtttgagaaataaagagaaagagtataaaagagagaaatttatagttgggttttcgggggtgatattatatgttagtaggttttatgatgtttatttgagtcgtaaaattagtaagtttttattacggattttaaaaggggtgggggtttatgaatagggaatgggttatagggattatatgttttagagggtagtaaaagattataaggtagagggtaaaattagaattattgatgaggttttatatttcgttgggtatatattgttattgataaatattttaataggaaatagggttcgagagtagagaattagtatgattagaatttgttaggttggaattttttaattttagtaagtttgagggtattgtaggagattagggtatattttattttttatttttaattatgtaatttagatatttttagagtggttattttagagatttttttcgggaatgtattttttttttagggttattttttgttgataaaagaatttagcgatattttttttatttgtttttgtaagaagagaaatatgattttgttttgtttggttttgtaggtagttagattttatggttattttttttgttttttgaaaattgttgttattttgttttttttaaggtgtttagtttttatattgtttaaatatatatgttttataaataatttatgtagttaacgtaattattatagggttttgaggtgatatatatttttagtttataaagatgataggattaagagattaaagtaaagataggtataggaagttataagagtattgattggggaagtgataaatgtttatgaaatttttataatttatgttattttattgtggttttagtcggtttttttatttagggtttttgatttttcgtaatagaggttaaatatttgtacgaggaaaattaaaaatattgtcgaaagaaattatagatgatattaataagtagaattacgttttatgtttatggaagggtagaattaatattgtgaaaatgattatattgttaaaagtaatttataaatttaatgtaatttttattaaaatgttattattattttttatagaattagaaaaaaataattttaaaatttatatggaattataaaagagtttatatagttaaagtaagattaagtaaaacgaataaatttggagtattatattatttgattttaaaatatattgtaaggttatagttattaaaatagtatgggaatggtataaaaataggtatatagataaattgaatagaatagaagttttagaaataaaattaaatatttatagttaattgattaaataaaaatataaagtggggaaaggatagcgtatttaatagatggtattggggaaattggtagtttatatgtagaagaattaaattggatttttattttttattttatataaaaattaatttaaggtagattaaagatttaaatttaagatttgaaattataaaaattttagaatattggaaaaatttttttagatattggtataggtaaagagtttatgattaagaatttaaaagtaaatgtaaaagaaataagataaatagatgggatttaattaaattaaaaagtttttttaaaggaaaagaaataattattagagtaaatagtttatagagtgggagaaaatattcgtaagttatatatataaaaaaggattaatatttagaatttataaaaaatttaaataaattagtaagaaataaataaatatttttattaaaaagtgggttaagtagaggaatagataatttttaaaagaaaatatataaatggttgataaatatatgaaaaaatgttttatattattaattattagggaaatgtaaattaaaattattatgtgatattaatttatttttgtaataatggttataatttaaaaataaaaaaaaaatagacgttggggtaggtgtgatgaaaagagaatatttttatgttattggtgggaaattaaattagtataatttatggaaaatagtatagcgatgttttaaagaattagaaatagatttattatttgatttagtaattttattattggaggaaaaaagttattgtatgaaaaagatatttgtatatatatgtttatagtattatgatttataattgtaaaaatatggaattattttaaatgtttattagttaatgggtgaatgaagaaaatgtgatatatatatatgtgatatatatatatgtgatttatatatatatagattatatatatatatatatgatttatatatagattatatatgatatatatgtgatttatatattttagaatattatttagttataagaaagaatgaaataatatttgtagtaatttagggggaattagaaattattattttaagggaagtaatttaagaatggaaaattaaatattgtatgtttttatttataagtgggagttaagttatgaagatataaaggtataagaattatataatggattttgaggatttttaggtatgagtaggagttgggtaagggataaaagattatatattggatatagtgtatattttttaggtgatgggtgtattaaaattttagaaattattattaaagaatttatttatataattaaatattatttgttttttaaaaattattgaattaatttttcgaaatgattttttaaaaaatttttattggaaggatttttcggagttttgaggaggaggtttgagtatatgtggggaaggtatagatgaatatataggagggatttttaagaaaataatggttattaggttattgttagatttattatagggttttttaaattagggggtttttttacgagtatattttgtggagttaaaggttaaaatttataggtgatagggttagtatattaaattttatttgttttttttttttttattattttagttttgtgattagtatgatttataggttttagtattgtaggtttttttttttttttttttagttttcggggtttatgggtagtttaagggagatatatatgtaattttagtggggtttatgagtagttaggatattaggtttgtttttattttaattttaatttcgattttgggttttttggagattagattagttttatttataagttttataggttttttttaaatatttttgtttataaaatttttatgtttgttaaggagattttagggttttttgtattttagtttttagttttattttagtaaatataatttttttaaattttgaagagttttttttagaaagaggattttgagttttttagtttttttttaaaaaagaaaaggtatatgtttttatgtataaaattttatttagaatttgaaggagtttaaaaatgtaaaaattttgtataggttaagtatttatattttaagtaaatttggagagtattttttagagatattttaaatttaggttttataattgttttttgtaaaatatatagtttttgggtttagttatttaagttttagagtagttttttataatgtattttatagttttttttttagtaggatgttttgttttttttttggtttttatgtatattttaagttaattagtttttttttttgtatatttttatttagatgtttgtttttaaatttaggttatagttaagataagggtggggagaaggtgaaatatttattattattttaattttttaaaataaagatttttagaatgtttttttttatttttattttgatagtaatgattcgttttaaaatttttttagattttatattaattttaaagatttagatagtagtataaaggaaaggtagtagaagtttacgggtgttaagagtaggaggtgtgggatgtagtagtagggtagaaaaggtagttataattgtaaggtaggtagaagatgtagtagagtagataggaagtagtttaattgatagagaatattggaagatatgagaataattaagggatataaaataaaatgataaatatttggatgtaagagtgatgttagggttaaggaaaattaaatatggttaagatggttataaaataaattggataaataggaagtggttgtatagataggaagtagttaagaaaagaggatttgggaagtgaatttttaataatatggttattatgatttagagtgaaaagaaaggtataaaataggtataatgggatttttgtagagggaattatgtatgtaaggtttagtgggtagatgagcgggaggtatagagtagatggaattagatgagtgaatagatagatgggtggaattgaatatatggttgagtgaacggttggatgtgaagtgagtgggtgaggagatgggtgtatgagtgtattgaaggagagagtggttgagttttaggaaggataatggatagatgggtggttgaatagatgtatgtatttttgtatgtatgggtagatggggtgtgtgagtgggtgggtgagtgaatagatggatggataagttgaagaggatagatgaataaaagtatagtcgaatagatgtgtgtaaagaaggggagagttattaagtagggggaggatggataggtgagtggatataagtttttatgtatgagtagatgggtaagtttgtgatgtataggtgggtaaatggttgcgggagtgggtggtggatgtgtgcgtaggtggattggtgaatgagtggatggatggggtggatgaggagagagataggtttaagggatggatagatggagagatgaagattgaaggatagaataagtggttgtggatagttttgttatataagtggatatttagttattttgtagagattagtagttttgaagataggaaatgtaaattaaaatttataagaaaaaaaatgaaggtttaggaaataggaatattgtatattggggttagaagaggagtgggtataaaataagggattagaagttatttttttttttgatttttgtggtaattttaaagattttttttatttgggatataggtattaataattattattttataggtgtttaatattggattagttttttaggggagaggtcgggtgatttatattttgtagttaataatgagggtgatagattggttttttatggttatagttataaggtgttatttggttatggagtgagaggtttaagtgattgattgaagtaggggcgttaatagggttggagatttgttgatgaaagttgaaattaatgacgatgagagtagtaattataatagttgttatttattaagtgtttatagtgtaataaatattgtgttattatttttttatttgtttgtgttaattttatttattgtttattttaagatgtagaaattgaggtttaaaaaatttaagtaatttgtttaaggtataggttaatataatttgtagagaaggatgtattttaagtttaaattttgggttagaagtgattgaattttgggtagtgcgtaggtgtgttgtggttaaaagaaggaatagggttttatagtttagagcgtataggttttagggtatttttttataaaagtgtgggttaggtagattagaggagtaaatagatttatttgttaattattagggtgaggttttagaagacgggttaagtaggttgaagtcgtttagtttgatttttatataggaagttgataagttggtttggttttaggtttaattgttggatatttgggtattgtagagaattaggaggggagtttggagattaggacgggtttagaaaatagttaggagaaagaaatttttaggaaatttttttggtattcgagagaaatatatatagagtgagaggtaaagagagttattatttttttttttttggtgtttgattttagattttattttattattttttttatcgtgttattatatttaggaagaggtagagggtgggtgtgttgagttgggtagtttatgatatttagtagatagatagatattttttgttttttagatattattagggaagtaggggaaatttaggtttaggagtaaatttatagggggtgtatttgggagagtttatgagggttaggggaagggatacgtttttaggagggaataaatgggggattttgttttagaagggagtgtaatttgtatttgtggttatagagggttgttaagaattttttaataggatagtttagttatgggaattgggaaggggtaagattaggaagagaggaggttggagaagtgtgtgatgtcgttgaatagtgtgtagtaggagggaaggggtgtagatgagaagagaatttgaagggttagtaattttattagtttttggggtagagagtatatgaattgagaaagaaagttgagatatagtttgtaaaatagttggaatttagattttttttaagtttttttttttttatatattttgttatttgtttcgagatatatatagttattgttatttttgggtttagtattgtaagtttagatttattttttttgttttttttatatttgatttttttatttttttgttttgtttaggttttaggtagaagttaggtggttatttttgtgttttttttggttttttaggtgaatagaatttagtatttaaggagttttttaaagttaattaattttatttttaaattttagttgattttgagggtattcgtatgtattatgtcgttaatatattttgataaggggaagggttatatttttgaagttagagaagaagtttaattttggaatgatggggatgaaggagaaataattgtttatattatgtaaaattgttttttgaaaggattttaaaattaaggtaagatttttgaaatgatttttgttgaatttttgattttattttatttttttttttttggaaatttttatttttttggtttatgtgttagtatattttattaatttttttgtttttttgtttttttattttttttgaatagtttttttttgatattttgtttattatatattttttattaatttagattttttaagatattttattaaaatatgattgatttttattattgagtttttttggtatttttttaaattttgtatttaaggtaagtgtatttttagttttagtttggttttttatattgttttttaatatttaatattttttatttattttatttattttatgtaaataattgtaaatttttatagatagaattataaatgtgtgtaaataatgaaaaattgaaaatagagagaatatattttatgttttattggatattaatatatattataatgttatagtaaaaaaatagtattaaaagtttattatatgtcgaatattgttagatgttaaatatttaaataaaagtaagatataggttttgtttttttgatgtttatagtttatagaagagaatataagtgataagataatagtaggtttagatggataagtgtagatatggggtaggtataagatgttgttgttaaggtattagggaaggttttttggggaatagatggttttaatgtaggtagttcgaaaatagggtagaagttattttttatataggaggaagtaggtttaaaagtgtgggtttagtgtggtaatgatatatttgaagaattttagttgttttagtatgaatggagttagttttggatgtggaatagtagtaagaaaaaaggaaaaatagataggtaggggttggattatgatagatgttatatgtaaagtttaggagtggttattttgttttggaagttataaggaattattgaaggattttaagtaggagagtgatggcgtatttgtaatttaggaagattattacggtaatagtgggtagtatgagtgaaagaagttggtttaagaggtaagattaatagtgtttgaataaagagtgaggaaatgggtataggagtaaaatgatggaagaagaggatttaatttgattgatattaaagggattattggtgagtgatgtcggtggtattcgatttagaaaatttttagataatttttatttttagattggttaatgtaattattttttttgtgtgtgtgtgtgtaagtgtgtgttatttttttaaattattttgattgataaaaattatttatatttattatgtataatatgttgttttgaaatgtatgtatattatggatcggttatattaagttaaagaatttatggtttattttatatatttattttttgtggtgagaatatttaaaatttatttttttagtaatttttaataatatattgttagtaattatagtttatgttatataataaaatttttaaaattatttttttaatttaaatgaaatgtattttttgaaatgtattttaaatgaaatgaaatggatgtattttttgattaatatttttttaatttaatgtaaatattttgattttatttattaaaaagggtaatgagagaagatagtttgattgagagaagagattgagtttagtgtggggttattgtatttagaatatttaaaagttatttaaggaaaaataatatgtaaatatttttgtatgatgggtggttttagtagaggagtttaagttagagaattgagagttattaagtataggtgtaggttagatgagtttttttaggaagagtgttaaaaattagaaatgtagggattttagggtatgatgagagaatataataattaagaggagattttaaaggatgataaggaggatttagtaaataggagaaaaataaggatagagtagtttattagaaagaagtggattatggtgtaaatattattagtaatttaagttagaggtattgataagaatttattggatttgattttttatagaggtttttgatggtcgtgatgagaggatttttaggggtgtattggagataaaagttagaagtttagttttaagtgtgaggatatagagagagtgtttttagggtaggatgtagattgaaggtaaggttgttttttattagttggtttatggttatgttgtttttttttttcgtaggttatagtggtataggtagtatttggttatatgagtaagttttttagtgatgatttgtgagattttggtgtatttattatttgagtagtattttttgtttttttttatttttttttttaggtttttaaagtttattgtattatttttatgtttttttatttttttagtttagtttttatatattagtgagaatatatgtttagttttttatttttgagttagtttatttagaataatggtttttaattttatttaggtcgttgtaaatgttattaatttatttttttttacggttgagtagtattttattatatatatattatagtttttttatttattcgttgattgatgggtatttgggttggttttatgatttgtgattgtgaattgtgttgttataaatacgtatgtgtaaatattttttttatataatgatttatttttttttgggtagatgtttagtagtgggattgttggattaaattatagttttatttttagttttttaaggaatttttttattgttttttatagtggttgtattagtttatatttttattagtagggtagaagagttttttgattattatatttatattaatatttattgtttttttatttttttattatggttatttttgtaggagtaaggtggtattatattgtggttttgatttgtatttttttgattattagtgatgttgagtatttttttatgttttttggttatttgtatatttttttttgagaattgtttatgtatgtttttagtttattttttgatggggttgtttgtttttttttattgatttgtttgtgtttattgtagattttggatattagttttttgttagatgtatagattgtgattattttgtgggttgtttgtttattttgttgatggttttttttgtcgtgtaaaagttttttagtttaattaagttttaattatttatttttgtttttattgaatttgtttttgggtttttggttatgaaatttttgtttaagttaatgtttagaagggtttttttaatgtgattttttagagtttttatagttttaggttttaggtttaagtttttaatttattttgagttgatttttgtataaggtgagagatgaggattcggttttatttttttatatgtggatagttaattattttagtattatttgttgaaaagggtgtttttttttattatatgtttttgttcgttttgtcgaagattagttggttgtaagtatttgggtttatttttgggttttttattttgttttttttgtttatgtgtttatttttatattagtattatgttgttttggtgattatggtagggaacgtgagtttttttttcgtaattttatattggttttttttattgtataattattttttttttttgaattttatatgttagttttttatttatattttaatatttatataaataaatgatgttatttttatattttttttattagattaggaggtcgtataggattatatttataggtttttaaattaaggagtaatattttttgaaagtttatgaaattatttagtataaatattatagaattagatgttttggaaaatgtagggttttttatgatatttttttattttttttttatttattgtataatttttagttttatttttttaaagtaattatagattcgttgatttaatttgattttaagagttttgttgtaaaggtaggttatattatttttatattgaagataaagaattgaagtttaagataggtagtgttttttaagttgtatatttttatggtagtgtaggtggtgtgtttatgtttttaggtgtaaggtttttagattgagttttgttgattttgatgatagttttatggaaggagttagtatttttcgtatattttaggatttatagatatgtgggaggaagaaaatatgaatgtgtattaatttgaagtacggttttgaataaaggtaaaatagattttaggttttatttttagttttgggatggatattttaatttttttaaattatgttattgaatgattttttatatattgagatagtattttttttatattaggttatgttttgtgggtgtgtgaggtgtggtagaattggggaaatgataatttttgtaggtgggttagtagaatatttgagattatttttagagtaaagaaaatatattatttttttaaaatttatgattttgattggttaaaatgagtgttagtgttttttatttgttttcgtaatagtattattggttttatattgttagatttttaatattaattttttgtttagtgagtaatgatttatataaagtttagtgtttattggttttttttttagagtttgtttaattttagggttatagaagattgtttgggtttatggtttttaatattttagataggagttttttttaatgagtttttgtttttttgattgtagttttttttattttgttaattttttttaattttatgatgattttgtaggttttagggggtttttggatagtggttttgatagtattattgatggtgttgtttatatttgtggtttagagtagggttattttaggtaagagtagagttgttatttttggagggtttggtttagggaataatttttaggggattttttttttatggaattagattttgagatagtatgtggggtttttgttacggtttagtgtttttttattatagttggagaattaaatttattttttataggataggttgttatttattaggtttattttttttttaggaatatggatatagtaaataaggggaggtgtttaggggttaagttgtttgtttatggggaaatggggttaagaggtttaggataattttggatagataaggttttagagagagaggttggtaagtgtagatttttgggtgtgtttatatttgtatttaattttgaggggatttaggtagagagtttttagttggtgtgtttagattataagtattattgaggatttagtgtttatagagaatgttttttattttttagggtggagtaggagttaatgttttttggataatgaaggtaagatgggagggagggggataggttcgagtttttaaaggtatttttgttgaaggtattttttttagtttttttagaatttggttagagtattaggatgggttgaaatttgttagaagaatgagataaggatgtgtgagtacgtgaaagagattgagtgtaggttattagatagttaagaaagtagtaattaagggaaaaatttttgttttttgttgtttttttgtggttggtgtaatattatggtttttatgatttattgttttttttttaggatgtttttatttttttggtttaaatttatattaatattttgagaggaaggattgtagagtaggtgttttagttttttattgatttttatttttttgtatagattttttttttgagatttttttatatttatttaggatatttttagaaagtgttgtttttatgttatttttttattttttagggtaatagtattcgaattttttgaggatagttttttaaattttaaagttttttatttattattttaggtttattgttcgggaaagggtggataaattgtatttgtagttataggggtgttgagaattaattagtagaatggtttagttttgggaattggagaggggtgaggttggggagagaggaggttggagtagcgttggtgatattgaatagtgtttagtaggaggtttatagtaatagtgtttataggtagagttgtttgtaggatgaggggtggtgttgggaaacgttatggaaatttttaaggtgcggggtagtagaaagtataggagggagcgtgatgatggtgggtagtgaataggtggacgggtaaagattgggttgaggttggtaggggaaatgagatgaggtagtggagttatgtgataggaatcgagggtgggttattagagtttttcgtgtagaatgaatgtttaattaaaatttgttggagggagagttggagttataggggagtgggtagagtgggtagggttaattttataattttttgtatgtttttttaattttatatatatttttatttttagagtataagaggaaaggtataaggagttaggttgtggtttaaagtgagagaggggagggtggagaaaagtttggttgagataatatttagggagtaggagatgatacggtaggtgaaaaaattagatttttggaggtaatatttttttgtttttgataagttttaaaatgggttttttatagttgagttttttattttattttatttattattttaagtattagggttatattttcgagtttttttgttatattagttgggtatttgtagaagtttattgtgtatttgagtttttgggtatttatttttttgttaatttaattttttaaataaaatttttagtataaaagagaggggggaagatttagttagtaaatagttaataaatattttttaattattaagatttggtgtttatggaaagtttttttgaggttttttagtagtttataagttgatttagttttttttttatatgtatttatttagaattttgtttttatttaaataggttatatagtgaaaagaggaagggaattaagatagattgagtagtaatagatataatattatgtatttgatatatgtgagtttatttggtttttatagtagttttgtaaggtaaatagtattattattattttgttttttaagaaatggagagttagaaggttgttttttgtttaagataatttagtaattagtcgtagtgtaagaattggaatttttatttgtgatatgtttttttttttatttatatggattttattatatttttttgtaattatattttaatataatttattttgagtgagagatgaatttatttagattattggtttttaaattgtgttttgggtaatttaattgttaaagatttcgtaaataggataaagttttttatatataaaaaaaaaatgaagttttaaattttattatatatttattatttatatttgttttgtaggtaaaattttttttaaaaagttaaatgttgtaaaagaaagttttgaaatttttatttttgattaaaatatgtttttttattggtgaatgaggaagaggaataaagattaataaattaaaatgagaggatatatatttagagtggggtatttgaatagggaggggtagattaaaggggttgggggcgatgggtttgggtgtttagggggttggagtttaaggtattaggagaagaggcgggttaagatatttaaagttttgggattttgttttagagatgatattggaaattataggtcgagtttacggtgtcgttgtgtttagttttattttttttttattgttttttgttattagttgtgtattttttatgaggggtgaggttaataaacgtgagttgttaatttgtagaatatgaaataggtgtttaaaataaattttaatttgttgtgtgtaaattatagtattttaatttttttattgtgattaggaatagattaggtttgaagaggtttagatatgtgttgggttattgttatttttgtatatatatgtatttgtcggatattgtttatggtgttttttaggaagaattgtaggtggaaaaggttgttatatttttttatgtaaaaatgatattattaatgtttttaaatttaaaggagtttagttatttagttttttggttgttttggtgatttttattgattaagatattttttaggtgttttgagattaagtttttttatagttatgtttgaaagtgaaaattaatttttaggttatatagttttttttatggtaaattttaagaagttttaagaaatgtatttttggttaagtgcggtggtttacgtttgtaattttagtattttgggtggtcgaggagggtagatttcgaggttaggagttcgagattagtttggttaatatggtgaaattttatttttattaaatatataaaaattatttgggcgtggtggcgtatatttgtaattttagttatttaggaggttgaggtaggaaaattgtttgaattttggaggcggaggttgtagtgagttgagattgtattattggattttagtttgggcgatagagtgatattttgtagaaagaaaggaagaaaggaaggaaggaagggagggagggaaggatattttattgaaagaagaaagaaggaaggaaggaagggagggagggagggaggaatgtatggaaatgtatttttgtatttttagtatgtagagatgtttagtatgtagaatagtaagagtaatttgaggtatttttaagaaattggtagagaagagagagaatttagttgtagaaagggaaagaaggaatggagggttttttggaggaggtggtatttgagttaggattgatattaggatggaaatgttaggtagggagttgggtagggggagtagttttgttttttaggtttttaattttttttatttttattgtttttttgtttgagggattttttttttgatgagattttgtttttttttgagacgtgaaatgtttttttttttttttttagtcgttagtagaaagggttgttttttttttagcgtgcgtttttttttaatgattatttagttattttgagtagtgagttttattttttttagtaaattttttcgttgcgtggtgagaaaattgatgtttggagtttgtgatttgtttaggattatagaattcggtagtaggaaaaatcgtatttttaaatttagttttgagtgggaagatttgaggaaatagttaatattgaggaggggggtgttgttgggagtggtattatttttatttttttttgttttttatagagaatttcgtttattaggaacggtaggaatgttatgcgtttaatgggatttagcgcgttgtggacgggtttatttataatcgggaggaatacgtgtattttgatagcgtagtgggggagtttttagtagtgatggagttggggcggtttataggcgagtattttaatagttagaaggattttatggaacggaagcgagtcgaggtggataaggtgtgtagatataagtacgagttgatggagttatttattcggtagcgtcgaggtgagggttgtgaattagggtttttggggtagtcgtgggggtcgggtttagggagtaggggtagtcgggtcggtttaagggattttagtgttaggagggaaggggattttgagttggggattgatgggaggagtttaatcggagtttgttaggagggtgagtacggagattgggttgagtatggagtgaggaggatggagggagagagatttttgggattttattaggtttggtagttgattgtatgtggggtgaggggaaacgaggttataggatatcgtgtaggggtgcggtgtggagatgaaggtggagatggtatagtaggttacgtagagaagaaatttgtagggagatggtcgggtttgaggtgtttgaggggttagatgggtggtttgatgggtaggtgagagaagagtttgtagcgggggaggggtttggtttatatgagattatttagggagaggggatttatcgggaggagtataggattggattttgggaattggatattgtgattttgtaacggttttattgtttggggtatatattttggttttttgttatggtcgagaaaatttacgatatagatatacgtgaggagtgggtttgggagtggaaagtttaatagaaaagaaaagagagaaaaaatttttttttatgttgagaaagtgggttgtttaaaagagggtttgcggtttgtggtggaatgtagtcggttttgtatagaggttgaggaggcggtgattgatttatatagcgtttagggaattggtttgattagttgtgttatttatatagtttacgaaaagattgatttttttattttagttttttattatttaaatacggtttttaattggtggtggataggatatttgtatatgtggttttatttggaggttgttatgatatttgtaaacgtggtgataaggaaaagagagtgggaatcgttatattggatgtatttgatttttaggtatagttgttagtatttatatataaaagtttttagtttgtatatttatgtttgagtttttaggttgttttttgttagagaagaaatggtttggggttgttttttattaaaggaaaattttattgagaatttttattttttttagttgtttaaaaataattttttaataatttttgtattatttttttttttaggagacgtaattataattgttgttagggggtgttggacgacgattttttttggttattttttgttgaaaaggggcgtcgtgtcggggggttgtagttggggttttttttgaggttgatttaaggttttttggaagaatggtatgtttatgtgtggttttgtttgtagtattatttgaagtttgattgtttttaggtaaaaagagataaattttataagaaggtttaaaatatagggttattatatgagtattaagattattatttatagattgtaattatggtagtagagtttgatatttgttatattaatggattgtaatattggtttgtttttattagatgtcgttgtatattattagaaacgttaatataaaagtattattttttttgagaaaatatgttttttttttgatttgttattagggtataatttttggtttaggttattttttataatttatgatatgattgggagaaaaacgttattgggtggttaaaataattttggtgttaattttggtaattttttttttttaattattaaattttttaattattaaatttttttatgatttttatagatttttttataatgtatttaattttttgatttgttttaaataattagttatttttttttaggataagaatttattatataagatttttttttatataaaatttttttatttgtaattttttttttatagtttagagtgtattatttattaatttttaataaaaaagttttattaaatttagtgatagtaaaatttttatgtttattttttgtttgtaattattatttttgttataagtaaaataaatttgattaaattttttttgtaattattaattttgttataaagatgataattaggtaaaatattataggaattagaattttataattagaattttatattgtgggtgttatagtatatagttttattgtaaataatagtatgatgataataatttttataaaagtgacgtagtaaataatttttatttaaaattttatttgttaagatataatgtttttttttggggatttataaagtaataaatgtagttttatgtataattaaaatttttttgtaaatatgtattaaaaaaaagttttaatattgagtagtgaattttgagaggaaaggtagaaatgataaagagtatttggtgaggtaggattggcgttaaggcgagtagtttttatttatttatttattttttatgatttttagtttaagattttttatatttttatattgatatttaggatgtttttttgggttgttaaaggttgtttttttagttttttaggttttgatttgagtgtgatatatttagaggttgatatttgtaatttttattgttgggggggttgaaagaagaattgtgtagggttttttttagtttggtttagggaaggagagagagatgagtttttattaatattaaattttttggtggtttaattttttggggttggtttttggttagttgtgttaatttttgttggaagtgagttagagaggttatatttttaaataatttagaggttttttgtttgaaaataatttttgagtatattgatgataagttttatttttttttatgtgaaaaagtttggtgaaggattttaaggattttttattgattggaggttagtaaatggagtttgttatttttagggttggaatatttttaagaagtggtttattttatttttgtaggggaatattgaggtttaattttttttatggaggttttcgagattaaaagggtttgaagtgtgttaatgttttgaggtttttttgtcgtttgtttagttttttgtttagttaatttattttttttggttattttatttgtttttttttgatgttttttataatatattattgttatttttcgtgaaaggaaaattgaggataataatttgttaattttttggtgatattttataggagatgttttagtggtaaaagaatgtttttttttttaaatagtagtatgagtatggagaattaagaaagtatatttggagttagtggaaatgttagttattttttttttgtttaatttaagtgtatttgtaagaattattagtttagttaattgagtgtttgtgtttggggagagatattagagtgattattgtttgttttgttttatgtattttttgttttatttgttgtttgttagttaaagttttttttagaggatagtaattttgttatattatgtggggtgtaaatagttaaattattttttagggttaatttggaggtttttttgattagtagagttatcgtggtaatggtttggaagtatgtgtaaataataggtttttttaattgtaattaggaggttgagaaaaatattggaatagagttttttttgagatattttttatatttacgttatgggaagaagagaggtttggattaaagaggagaaaagagagagagattggttcgagtgtttagaaggaggtttagttttttttttttaatttttagaattatttggtggttttcgtgttgtaatggtagtttgagttattggagttggggtttgagttttaggatttattagttttgttggattatttgtgagattggttttgattttagtgattttcgttttcgggggtagtttgatttttagtggtttttattataggttggatagggttgaggtggtttttttttgttgtttgggtatttttttttaaaatgttttggtttgttatattgatagtaattagcggatgtattttagaaattttggattttgtaagtttgtaaagttgttattagagtttttgttttttttttgagttttttttttttttggggggtttttttttggtttttattataagtggttatttttaggaggttttttaaggtgttatttggttttatagcgtgtttttatagtttttttttaatattaagagttgtttgtgtaataaatttgtttttataatgagttattttttgattgaattaggggttaaggaagtgtgttttattagtgttttttttagtttttttataaaagttgtaggatttttatttggtttttggtttattatagatagttgagaggaattaagaggttaggttttagttttttatagattttttaatatgtatattttaaaaatgtttttatttttatttatttgtagagttattggggttttagttggggttgtcgagaggaattgtttttttttttattgggaatggtgtttttgttattttttttattttttttattttttttttttttttttggtgtattataggagatatgttgtttatttttaaaattatttgttgtttgtagagttgtttgttttttaattgcggttagagtttggtttaggagtagtataatatttttttatgtgaggtgaaatatttgagttaaattttggatagtttttatatatttattggggttattagaaaattagtataagtttttttttgtttgtttaaggttttgtaatgaaaagggagtttgaggttgaagggggttagtttttttatatttgtgggtattttttattaggtgggacgagagattgagaaaagaaataagatatagagataaagtatagagaaagaatagtgggtttaagggattagtgtttagtatatagaggatttgtgtcggttttggtttttgagtttttttagtatttattgattattatttttattattttagtgagggggatgtggtaggattatagggtaatggtggggagagggttagtaggaaaatatgtgagtaaaggattttgtgttataaataagtttaaggaaaggtgttgtgtttggatgtgtatataggttagatttatgtttgattttatataaatattttagtgtagtaaatagtagtattattattagtatgttttatttttagttataaggcggtttttttttattttagtaaatagaatgtatgatcgggttttatatcgagatattttatttttagggatgagtaggagatagatgttttttttttattttaattgtaaagaggttttttttttttattaattttttttagtatagattttttatgggaattagttttggggacggttaggttaggtttttttttataaggttatgttttaggttgttttttttagtggggggaatttttggataatatttaggtttttttgggtagaggtttttgcggttttttatagtgtattgtgtttttgggtattcgagattggagaatggtaatgatttttattaagtatattgtttataaatatatttttaataaagtatattttgtatagttttaaatttattaaattttgagttaatatagtataggttttttgcgagtatagggttggggttagggttatagattaatagtatgttaaggtagaagaattttttttagtatagattaaaatggagttttttatgtttttttttttttatatagatatagtaatagtttgatttttttttattttttttatattggtaattttaaataaggggaatttttagatggtttttttggaaattgtttttttaattttgggggattattttttataggtttatttgatatgtttatttaaaaagttgggttgattttatagtgtttgtaaaggtttagtaaaaaagttatgtttttgtgtaaaagaaaatgagttatttttttttttaaagttttgaggttaaaggagttttagtgttttagagtgtattttagaggggtgtaagttgaagttggtttgttatttatttagaaaaagaagtgagaataaaagtattttttcgtttttatttttttattgtgatttagggtggaggagaagatagtggaagtgttttttttattgttttttttttttggtttttgggttttggtaacgtgttaaatgtattatttatggttgtaggcgtggttttttaagtcgtggaattggataaattaagtgatgggattaattatattttatttatataattttagtttatttattttatgtgattttttttgacgttttaaatttgtgtgatttgtttggtttttagaaaaatggatttttagagagattatgttatttttgggtaggtttttttaacggaggtagtgtgttagattgtttgttattacggtttatgttaagatatttatttttagtaaaatggttttggttaattttcgaatttaaaatttttttgttaattaagtattattttaattggagacggaaatgaacgtaggaatttaatggttgttttttttgttgatgagatagtattagaattaaaattttattatagaggatattttattttaaattgttgaagatagtgttttttcgtttatagaagaggtttttttagcggtacgaaagaatttggaagcggtagtgttacggtaaaaaatcgataaggtgtttgatgaagaggatttttatttttattaggtggtgttgttggtttagtattattatgtgttcgttagagaggatagagagtaatagttattgtttgtggtatttgtcgattttttttaataggagtgtttttttgaattgtaaaatttttcgtaaattgtatatatagagagagaggataggagatatagtgattacggatataaaggaaaggaaaattttgtaacgggttagttggagatttattattaatatttggataggttgtcggaggttgcgtttagtttagaagtttttgaataatattagggtgtgttttggttagaaatttttagttgttttaagatttttttagttttatgcgatggtgaagttttttatgaaaggaaattggtatgaagagatttttgagattaaagaatagatttgacgtttgttttatatttattatttcgatgtttttattttttattttgatttggatttcggatgagtttttaaaatgaaatagttttattgtttagggtatatattttggttttttattatagtcgaaaagaatttatagtacggatatatataaggagtgggtttaggagcggaaagtttaatagaaaagaggagtgagaggaaaagttttttaatgttgataaggtaggttatttaagagagggttttttgtttttggtggaaagtaattggttttgtatagaggtttgaggaggtagtgattgatttatatagggtttaggggattggtttgattaggtgtgttatttatataatttgtaaaaagattggtttttttattttagtattttattatataaatgcggtttttatttggtggcggttatgatatttgtatacgtgttttaatttggaggttgttttgatatttgtaaacgtagaagggaaagagggtgagaatagttatattgaattatttgatttttaggaatagttgttagtatttatataaaagtttttagtttgtatatttatgtttgagtttttaggttgttttttgttagagaaaaaatggtttggggttgttttttattaaaggaaaattttatttagaatttttattttttttagttgtttaaaaataattttttaataattcgtgtattaatttggttaagagagaaatttcgtgaaggagattaaaaagtattagtgagttttttattaaataaggatttttgttttagagaaagaggaaagaatgaagggggaggaggaggaggtttaggaggttatattattgatttttttgtttttgggaaagtgaaaggaaggttatttgataagagggagaagatgtatatattgagtaaggatgaggagagtgatatgggtttaggaaagttgttggcgtaattggttgagagaggtgtttaaataaaagtaatataatttgtaaaatttgttattaagattttatagaggtttaaattagcgatatggtagtatttttttttatggtaattagttgttagattgtagagattttttgatgttagattaaggagtgtggattttttttttaggttagtaggtttttaattttattgtttagaagattttttttgagattttttgtgaagtaaagatttttttagatttattgtttagagatttagattttttaggtggggaggtttggagatttgtgtttttaattagtttttaagtgatttttatgtaattagataagtgttagaatattgaagatttttgaaaatttttagaaattttaaaatgataaggttggaggtcgggcgcggtggtttacgtttgtaattttagtattttgggaggtcgaggcgggtggattatgaggttaggagatcgagattattttggttaataaggtgaaatttcgtttttattaaaaatataaaaaattagtcgggcgcggtggcgggcgtttgtagttttagttattcgggaggttgaggtaggagaatggcgtgagttcgggaggcggagtttgtagtgagtcgagattgcgttattgtagttcgtagttcggtttgggcgatagagcgagatttcgttttaaaaaaaaaaaaaaaaaaaaaaaaaaaaaatgataaggttggaaatttgtttttagaagattgtgaagttagttggagagagtaggaattagaggtagggagatgagataagaaattgttattattgtttagggaaattataataagggtatgaattagaataaagaaaaatataggggtaggggagacggaggaaagaggaggatagaagttttggttattttagtgtggatgtttatttaaatttagaattaattgagtaaaggtaattagaataaataggaatttttgttttggtgaaatatatttgaattgggttagaaatgaggttattgggtattaagttttagttgtagcgttttttggaggtttttgatgtgttttaggttgattagttttcgttaaagaagatggagtaaagtgttttttatggaatgttttgggattttaaaatagataattatatattttatgatttttatgttttttaggatatttatggggaagaagttttatttaatttatagttgggatttagatatgggttgattagtttgatggatgttgagtttatggaggtggttgaagtagaacgagagttaagtgtttttgaaataaaattatatcgagggaagaggttgtgaatgtgaataattttggatataaggtaaaaatgttatagggagtaagggttgggggttagttaaagattgtttatttatttggtttaggtttatgttagtgtatttgtgtttttaagaatagagtaaataaggatttagaagttttgatttggaatatttttgtaattgagttgttttttaggggtagttggtttttttttgttttttgtggaggaaaagggtattagtggttgaggtttaaaggaaaagttgtaggtggtagcgtggaaattgatttgtaagcggtagaaaaagagggggtaaaaatagagaggtgttaaggtatagttaatatttggttatttgagaattttaatggatgtgataatatagtgtagaggaggaatttagggaaaaggatgggatttttattatttaagtatgtaggggtttaggatattatgtaaataggacgattttgagtgtttgtaggcgaggttaaaaaatttataggttatttgtagaataagttacgttaagtttattttatttttttgatatatttatgaaatatagttattggattaatagattatgagaatgttgtttatatatatattaattttaagaaattatttgagtaaattttttattttttgtattaggatagagtatttaaaagataaggtagtgtcgttgttgattaaatattttttgtttaaaggttgttaattagtggttgatagataagattttttttaaatgtgttataaattggtaagtttgtgtgttttttattttttttaatattatttttatagttttaatattttttttatttgttgatttaattatattatttttatttttttttttttttttttttttttttttgagatggagttttatttttgttgtttaggttggagtgtaatggtgggattttagtttatgtaatttttgttttcggggtttaagcgatttttttgttttagttttttgagtagttgggattataggtatgtattattatatttagttaattttgtatttttagtagagatagggtttttttatgttagttaggttggtttcgaattatttgttttagttttttaaagtgttgggattataggtgtaagttattgcgtttggttattatttttatttttaatatttagaaattaattttataatgagtatgtttaagaaataataattttaaatgttattttatttttttatttcgttatttttagtttagtttagggtgaatattttttttttaagaaggagttttagtagtattacgatttgtttgtttattacgtgatagatttttatttagatagtatttaagttcgatgttttttgaatggataggaggaaatagttggggtcgtgtttattaatttgattcgtaatggagattggattttttagattttggagatgttggaaatgattttttagtagggaaatatttatatttgttaagtggagtattttagtttggatagttttgttatcgtggagtggagtgagggtttgatgattttttagattttatttttgaagagtaggggattttttggttttggggtttatttatttggttttatgtgtttatattttgggattatgttcgattttattttttttttatagaagatattgagtgtagttttaatttggggataatggagatttgtttgttttcggtttaggaggttttaaggatttatagtttttttttttgtttaagaatttagggatgtagatatttttttgaattgacgttatatatgggaattgttgtttttttttagttttttagtttattttaagttattttgagaggtaattaattgaatttgaatttgtttgttgttgaggttatattttttgttttagaattgagagagtgattgttttttagttttttgttatgtaaggtgtatttttttcgtttttttcgtgttaatattttgtattaggttgtaggattttagataggatatgagtaggggtgtagttgttggaggtgattttgaatttgagtttgttttttttagaggtatagtttgattttgtgtagagtaagatgttgataggagttaggggttttatgttggggtttattatttgtggagtggatatttttacgtatagaaggaggaagaaaggtgagaaattttgtgaggtgatcgatatttattttttttttgatttgtttattttttttttatgatgaggggttgagataaaaaagtaatgttagagagtttgttgaaattatatagttaggaaataaagatagtttttaaggagagaggaattttagtttggtattttaatgtagttagatgtatgaggttttagttatttaggtttttgtagagcgtttattgagtgatggataatggaagtatgatggaaacgtttttttaattgtttgaggtggttttagtagttgaatatatttttttttttttttttattttagtttaataaggatttgtataaataggtaatatttttgttttgatttttttgttgggggagttataggaggatataagttttttttgtatattgtgatattgaggtttttttaggaagagagttttaggtttgaatttttgttttaattttagttttggggtgagtggggaaagagtattgtatggttttattgttaaaggaagtttagattaattttattttttattagtttgagatttagttttttatcgttattttttttttttgggatttaaaggaagggggttagtaatttgggattattgttttttatttttatagggttgttgattttgtttaaaagattaatgtattttggaataagtattttttgtttttttagttttagtatttgtttcgaggatagatttttagttttttaagaggatgttgttgttgagtagttgtattgaagttagtttttattattttgtttttggatttaatgtatgattttttttatggggtttttaattaagtttttttttttttagtgttatgagtaattaaaatttaatatgattgttttttgttaagaatatatattaagttatgttttattattttttttttttgagggttttagtaaatagtaagagttaataaagaagtttattgtggtttagatataagaaagaagaaaattatgaaaatttatttaaattattgtataaggtggtttgttggatatagattttttttggatttattatattttagtgagttgttttatttttatgtttggtgtttttatttatttaggtttgaaattattatttttagttatttagtggtgaatagattgtaaatttgtgttatagggtttatattaatatagtattgatttaatatataatttattaagagtatgttttagtattattgttaagaaattaaataagtattagaatttaaaacgataaatataatttaatatatttttaatattttttttgtatgttattataaatattttttaattaaatgttgtttggttttttgaatgtattaagtagacgatatttattttttaagtttgtatttatttattagtttagattttttgagttaataatttatatagtgagaaacgtttttttattgttgaaagtgtaaagtaataggtgtggtatttttttaaatattgattttttttttataatttaaaatttttatgtgttttgtattttatattaagttattgtaaattaaggtagaagatatgtttggtttaagttttttttttcgtgtagaggatggatttttaatttttgatatatataatgagtatttagtggttttttgatatatttagttgttggtttttttttttttgattttttataagtagtttttgggttttgtgtgtttttgggcgtttatttttggttagtttattagagttattcgtgttttttttattatttaattagagttatttttttttatttttgttttttggacgtatgttgtaggtgttagtcgtatttagagtggagtgaataatttgtagattaatttttgtaggatgtaaaattgaggtatttgtatttataatgtatttgtattttataattataagtttaggatatgtatttttaggaaattgagaatataaggagttatagaaaggtattagatgtgtttagttttgatatatataggtatttattgaattttgggattttttaggaaaaatgtagtgtagagaaaggtttttgatgagattatagtatatagattatttagtgtgggtattattttgttattatattttaaattttttatattgattgagtgttatttaaatgttagattttttgttgagtgttaggtgtaggaggattataggtagttaggaggtagaggggttttggggtatataagttattgtggttgaagagtagagatttaaaagaaagttaggtttggagatttaaaggagatcgaagttggtgatttttttatgttaatttttgattgagaaagtttgatatttggagtagaataaatatattggggttaggattgttagtttagtgttttgttttttatttttttttatttttggtttttttattttttgttttttatagtgtgaataaatttttatagatgttagattattttttttttgtttaggtgtataaataattgtttatttttattagatttaaatatatattttttagagggtttgtgtgtttgtataaattttgtatacgttgatatatggtttgttgtttgaaggggaagaagattgtagaatgaggaatatataggaaagtatatagaatataagaagtaagtaggtaatgggaaagtttttaagaatgtaagggaataatatagaaaatgagaaatgtaaaaatgaatgaaaagaaaaggaatggggataaataatgatagaaatgatttatagaagattttagttgtttttttggtttttgaagatttatataatttttatattattttaataatgataatattgaatataattagaaaatatttattgaatatgtattatgtgtttaatttatttattgaatttttatatttttacgtagaagtgtttaaagaaggttaggcgcggtggtttacgtttgtaattagtcgggtatggtggtaggtgtttgtagttttagttatttaggaggttgaggtaggagaatggcgtgaattcgggaggtggaatttgtagtgagttgagatcgcgttattgtattttagtttgggagatagagcgagattttttttttaaaaaaaaaaagtgtttaaagaaaaatttttggttaggtacggtggtttatgtttgtaattttagtattttgggaggtcgaggtaggtggtttatttgaggttaggaatttaagattagtttggttaatatggtgaaatttttttgtttttattaaatttttttgtttttattaaagatataaaaattagttaggtatgttgtttgtagttttagttatttgggaggttgagttaggagatttatttgaatcgggaggaggaggttatagtgggttgagattgcgttattgtattttagattgggtgacggagtgagattttgtttcgaaaaaaaaaaatagaaaaaagaaaaaaagaaaaattttagttgaatttaatataaaagagttaaattgagtaatgaacgattcgtgaattaggtagtttttcgaggtagagtaggtttagagattttattgtaggtatgtggtggaagatttatggatagaaaaaggaaagtgatatatagaaaatagaagtgaggtatagaaatatttaattggttatagttgggtgtatttttatttgaatatagtttgaatagttggttatatatgattggtcgaaatttggtgattgatataagtgtaggttgtttatatttttatttgttatagtttacgatgtatagagaaatttttaggttaaatttaaaatatgtaaggaggtagttttaggttaaatttgatttaataattttttttttttggtaatttttttaatttttagagatttattaaaattttagttatcgatgttattattattattgtaaatgtatttatttggttttgaaattttttgggaaatagtagaataatgagttttgtaagggggaataaggattttaggttattttattttattttaattttatttttgtaagggttatttttttttgttggaacgttttgtttataggagaaaaaaataaaatttggtttgttttaggatttatgtgtttttttaaagttttagtttaattatgttatatttagtataagtgattttattttggtttggtttggtttgttggggtttagtgtatttagttttttattaaagtttaaaataatggttttttatgattttgtttaaaaatgttttttttttggttaggtttttatttaggtgagaatgtgattaaagtttagggttttagcgttatttttagttattattattttgggtttttagttttaatatattatttataggttaaaatgttattatggttatatattttttttaattttgttattttagttgaagagagataatttgatattttagagatggttgtatgtaaatatttaaaattttcgagagaatatagtgtattaggtagattattattatgattattaggaggataatattaagagtttggagtatgttttttatatagggtttttataaattaaattatttaaaattaaatagattaaagaatgagttaaataaagagtttatttatttaagtagtttttttattaattatttataattgaatttttgtatatttgacgtgatgtatttttttataggttataagtgttagtagttgtatagatatttttttgtttagttagtaagtaatttatagtaattttattattaagtataatttttataaaagaatgtaaaatttgttgtgtaattatcgtttttatagtagattttgtttagagtttattatgagggatatatttttaattattgtttgttttattttaaattatggtaaaaaggatttaaggaaaaatgtttttttagaagattgaaggttttttggtaatgttttttttaatttatgatgtggaataggggagtgaattaatgttttgtttttgattgattatgaggtaatttatgtattattaaaattttttatttatattgggtttttattttttatttattaaggtgtgaggttatttatgtataaggttggttgtaaaattttttattaataaaagtatatttattttataagtgtatataatagattttttttttatttttattgtttatagaggtattagtaagggaaaaaatatttagagataagagtttttatatagtagagaagttttgatttgtgattttggtgaaagttgtttatattaaggatattatttttttttgggaagaaatttttttggttagttttattttacgggttttaatgggtgtatatttttaagaatgtggagggattttttttagttgtgagattatgaagttaaagtttacggttttgatgtttattgtagtgtggatggtaagggtagtttttttttgatgtttttagaagatttaatttttaggttttagattgtgaaggggttgattgtttttagttagtgaattataaaaagttttttttatttggtgaaaatatattgtgaaataataatttattgttataatattagtttatttgtataggaaagtttttatataattagaaaatatgtattgaaaatgataattgattgaaatttttttataaatgtttaaatggtttatgaggtagtagaatgtatttgaagttttgattgtttttttaggaatatgggtttggtaaattaaatattggttataaattattttagtaatttagaagttattatattaatatgtatttaatttggattattttattttttttatgatgagttatggaatgtagaattttaaattataaaagttttaaaagtttaggaaggataaggtagttattttggttttttatgagtttatgtttgatacggttgtttttttaattgaggtgtatagtattgataattgatgggttattataggtaatttgagttagattatagagtttttttaaattgtgtatttaaataattttagtattgggtgatttagtatgaaagatttgtaaagtatttttttggtatttaattaatttgtgttttatttgggatggtagttttataaattagttagttttttaagttttaggaagtaggagaatggcgtgaatttgggaggcggagtttgtagtgagttaagatcgtgttattgtattttagtttgggtgatagagtgagatttcgttttaaaaaaaaaaaaaaagttttaggaatttttatttagtaaaaatgatatgattttaaagttattagaaatttgtaattaagaatattttttggggttttttttatttttttaggaattttttaaaagatattatattttagaattgtgtttatttgtgaagtttttagaaattgtattagtattaagtaattaattgtggaaatgattttttttttttttttttttttttttttttttttttttatttttttttttttttttttttttttttttattttgagatagagtattattttgttatttatgttggagtgtagtggtgtaatttcggtttattgtaatttcgttttttaggtttaagtaatttttatgttttagattttttagtagttggaattgtaggtgtgtagtattgtattaggttaatttttgtatttttagtagagattgggttttattttgttggttatttttaaaaggatatttagttttagattttgagagggatttatttgtttttgatttttggtgttttaggaggaaaatcgagttatattttaaagtaggatcgtagtgttttttttgttttttttaaggagttttaggttgttagaagttattttaggtttttttatgtgtgtaataaaagtggtaagaagataaaatggagaaaaataatttagttggttaaaaagaaaaaaataattaaaaaaaaataaagatttaagaagagaaaaaattaaaaggttttttaaatatatttatagtttggatatttatttttaattaagttgatttttaattatagcgttttttttaaaaaaaaaaaaaaattatttgattgtttttagagacggagttttgtttttttgtttaggttggagtttagtggtttaattttagtttattgtaattttcgttttttaggttaaagcgattattttgttttagttttttgaataggtgggattattagtgcgagttattatatttagttaatttttgtatttttagtagagatagggtttttttatgttggttaggttggttttaaatttttgattttaggtgatttattttttttggttttttaaagcgttgggattgtaggtatggattattgcgtttagtttaaaataattattttaaattttttattatttgattttagttaggttaaatagttaatatgtttggtttttgaattttattaaaggtaattttttaggtgaaattaataagttttaataaggttatgatttaattataagtgtacgaagtatttttaaaaaggtagtaagtaatttttataaattttagaatttttaaacgtagtttagagaaaggaaaatttaagacgagagttagaagttgtttatgaggggaagagaattagtaaatagtaaagattagaaagatattaaattaaataggttttattttttgagttggaattgaattttgtttggttgttattataagatggtaaagtttagttattaagttatatcgttggtggtttttattgttttttttagaaggaggagtttaagagtagttaatttttagtttgtaaaggtttttaattgtttaagataatttttagagttaattatgatatgaattttaaaatttttgttttttagagggtggagattaaaagaaagtattattatgtgattataaggttaagtttttaatgatataaaataagatgatagggaaattttatttagtgtttttttgttttagggattcgtagtttgtaattgattagtttgttaggttggtttgaatagtagatttttgggagttttaggtttatattttattttatttaattttttttatgattaaatgatatagaaagattaatttatagtataaagtatattaggtttgttatagtttaagattggtttataaatatttttttttttttttttttttttttgagacggagtttcgttgtcgtttaggttggagtatagtggcgcgatttcggtttattgtaagttttatttttcgggtttacgttatttttttgttttagtttttcgagtagttgggattataggcgttcgttatttcgttcggttaattttttgtatttttagtagagattgggttttattgtgttagttaggttggttttgattttttgatttcgtgatttattcgtttcggttatttaaagtgttgggattataggcgtgagttatcgtatttagttttataaattttttttattattaattaaaattttgtagaggagatagtgatttttattatttttataatcgtttttatatagagagaggttagaagtttgattgttaagaaatttttatttttttgttagtatgttaggtttttgggttttttttttttgagtggttttagcgattttgttagttgtatatagtttgggggttaagttataatataaaggaaaattattttttttgattttagggaattataggtaaaagttttttaattttgtaagatgttgtttaagagattgtatgagggaattgaattaatatttttttttttagttatagtaaaatatatgtgataaaatatagatattagttattttgtttagtgtttaatattgaattggtaaggtttaaatttgtttttggtggggttttgttatttttaatttatttaaagtggggtggaatggtttttagttagaagttttaatatgtgatttttagataagatataatagaaagttggaaaaaggaggtcgggcgtggtggtttacgtttgtaattttagtattttgggaggtcgaggtgggtagattacgaggttaggagatcgagattattttggttaagacggtgaaatttcgtttttattaaaaatataaaaaaaaaaaaaattagttaggcgtggtggcgggcgtttgtggttttagttatttcggaggttgaggtaggagaatggtatgattttcggaggtagagtttgtagtgagtcgagatcgtattattgtattttaggttgggtgatatagtaagatttcgttttaaaaaaaaaaaaaaaagaaagatagaaaaaggaaagaagagaaagagagaaagaaaagtattgtttgtagtagggtggggaaggtaaagagtttagggaggatagagaaggatttatttattgtagtgatattaaattaaaagtttagggttaggtgcggtggtttatgtttttaattatagtattttgggaggttaaggtgggcggattatttgaagttaggagttcgagattagtttgattaatatggtgaaattttgtttttattaaatataaaaaattagttaggtatggtggtgggcgttcgtaattttagttattcgggaggttgaagtagaagaattatttgaatttaggaggcggaggttgtagtgagttgagattgtgttatcgtattttagtttgggagatagagtgagatttcgttttaaaaaaaaaaaaagtttaggtagttgtttgttagttatgaaggattttttttagttattttattagtttttaagttttttgttttggggagaaaaaagttttttatgttttatgattttgtatatgtttaattttgttatatatagttattagtaaaaagcgtaaggtagatttaattttttaaattaattagttgtttaagttttttaatttttttttgtaaagtttttaaatgtaaatattgaaattttttagaagtttttgtatattaataggtatttttatatgagattgtatatgagattaatttgggagtttttatttttaaatgtattttagtgtagtgttgtttttttggaatgttttattgtaagttatttttagtaaaaaaaaaaaaaaaaattttatttgagatatagtttttgttatttaggttggagtgtagtattatgattttagtttatggtagtttttattttttgggtttaagtgatttttgtgttttagtttttcgagtagttggaattataggtatatgttattatgtttggttaatttttttttttaatttttagtatagatagggttttatagtgttggttagtttggttttaaatttttagttttaagtaatttatttattttggttttttaaagtgttgggattataggtgtgagttattacgtttggataatttttgtaaggcgttgttttttttagggtttaatatttatgtatgtataatttagaaggaatttagttttttagaaatttagtattatattttttattttaaatattggttttgtttttaggttttttgtttaatttagttaatgatttttttttttatttaagtgtataagaaaaataaaggagtagaatataaaaatttttgtgaatttttaaaagttaaattttatatttttgtaatattgttatttaatattggtttttttttgatttagttagatgtaagaggtttttaatcggatttaagttagttaattattggagttaattcgattttggatttagtttaatttttttcgcgatttttaaatttaattaggattagaaatttatttaaagaaatttagagagtttaatatataaatttgtggagtttcggaatttgtaagagaatttattacgatttttagttgtttcgagagagaaagagatataatgggtttggagggtatttcgttaggttatttagtatttttgggggttattagaagttttatttttaattttatttttgatattatttgataaaagaaaaattttagtcgaataaattttaaatgaggttaattgcgtaataaataatttataaatcgggtagttttttaagttagagtatgtttaaagtttttagtatagttgcgtggtggaagaaagtttatggatagaaaaagaaaagtaatatatagaaaatagaagtgaggtatagaaatagttagattggttatagtttaatgtttgtttaatttgaatatagtttaaatagttagttatatatgattggttaaaatttagtgattggtataagtgtaggttatggtttgtttatatttttatttgttatagtttatgatgtatagagaaatttttaggttaaatttaaaatatgtaaggaggtaattttaggttaaatttgatttaatagaggaaattattttatatattggggaattgattatagaagtaaagtaatttatttaagttatataatttttggtagaaataaaattgcgtagtttttttattttatttttataggattttagaatttttataggattagatataaaaaatattgatatagttatagagaaaggtagggaagtagggagatgaaataaaaattttttagggaaaaaaataatgaaggatatgaaaagatttttagagtaagttttagtgttatttatagattttaagttatgtttttatttttagaataaaaatggtattttatataattttattaaaatatttttattttaagttatagtaaatttaaaaatgttgttatgtatataatatttataaaatgtttttgttgaatgtatatttttaagtgtagttttatttggaaataaaagttgttgtatttgaaatatttatgggatagtattttagttttatttgatgtataagacgtagtaaaaggttgataataaaaaagtttattattattatagtaaaagaataaagatgagagagtatggagtttagtttggaagaggaagtgaggcgaaatgatattgtatggttgttggttttaagtaaggattttttttttaagtttaatacggggaaaattagttttttttttggatgcgttaagtgacggtaagtttagtgttatatacggatgttgagggttttttattgagtttatgggttagagaattatttatttatagaaacgaagtttaaagaaaaaatagatgaaaaatatgatatataagttgtgttatagagatgtcgtttgtttattttaggttattttgtttttattatatttataaagtttaaaattaaaggttcgtgtattttaaagtaaattttatttttaaatgttaatttttattttgttaaataaatatttattgtgaatttttattttttaggtattaaggatgtaatttagaagatttgggttttgtttttaagttgtttgaaatttaaaatttaaagagataaagaaaagaagattgttatatgtgtattttattttgtgttttttaattttttatttttataggttattttgattattattgagtattataagatatatattggagttatttaggagtataaagagggtatttttgaaaaatgagatttaggaaaggtttttagggatagtgtttatttgaggttagtaaaatagagaaaggggaaatgatatgtttagtaggagaagtaggtttaggagtagagaggtatgaagttgtaaggagaattgtagttttttagtgtgattgaagttaggggagatgtgcgtcgggcggtattgtaatttgttttgtgtgttgatggtaggtgtttgtattttattttataggatataggaagttgtgaagtattttaagtaggatagtaatatgatgagatttgtgtttggagggggtagtagtagggaggatgggttggaggaggttggtttgaaagtaagattaataggattttttagttattagatgggaagttatgagggtgtaggtaggggtaggaatatggggtgaggcggatagcggatgggtttgaatggtaataatgaaacgaaaagttataggaattattaaattatgtgttagaagtagggatatgaaggagtttagaatatttaacgtggagaattggggtattagtgattgtaaaggtaatgaaaaatgaaataatcgagagaaggtaagatgttttgtttggaatatgtttagtttgaatttttgtgggaataaatggagttaatttgaggatagtgagttaaatggttgggttttagggtatattaggttagtgatatagattggaaggaagtttattataagtgaagttttaaatttggattaggttatttaagaaaagtatataaagttagaatagtaagggtttgagtgtgtgtttttgtatttagataaatatagatatgaaaaaagaggttgaaaaggagaagattagaaagtaggaggaaaataaagaggaagtgggtttataaaagataatagataggagaaaatatttaggaaagaggagcggacgtattataaatatatttatgatatataagagatagagatagagaagtgattattggtttgggttgtataaaggttattttgagagtagtattagagatatggggaagaaaaagggagaatgtagtgggttgaagattgaatgaaatgagagagagttattaacgggttgggtgtggtgttttatatttgtaattttagtgttgtgagaggttgaataggaggattatttgaggttaggagtttgagattagtttaggaaatatagtgagattttatttttaaggggaaaaatatatatatatatatatatatatatatataattatttaggtgtagtgatagatatttgtagttttagttatttaggaggttgaggtgtgaggattttttgagtttgggagtttaaggttgtagtgaattgtgattacgtgattgtattttagtttgggtaatagagtaggattttgtcgagagagagagaggagagagagagagaaaagaagaagaagaaaaagaagaagaagaggaggagggggagggagaaaaggaaggaaggaaggaaggaaaaaaatttatattgtagatttttatttgaggaagttgatttttataatttacgagagaatttttagaggaggttgttaagttttggtttttttttttttagcgagaggacgtgggggaaaggagatatttatgaatttttttgagttttagtttttttatttttaaaattgtgttaataaaagtttttttgaaaatggtgttgtgaggaaggatatgaggtttggtatttagggggtgtttagtaaatggtggttattattgttagaatgagagaaagtaaaagagagttttaggtaaaatagtaaagaatagagaaaatagaataggaaagaaaatagtatttgtgggttttagaagcgtttagagtttttattttttttcgtttatttgcgtatttatttttgatggtttaggtttcgagaggttaagtagggtagttagggttatggtttataggaggattttggttttgcgttggtttttttagtttttagggtgtattgtaatggttattgtgcgttagattttaaggagaaaatgaggcggcgtagggacggaggagtttcgaatttagtatttttttttttatttttgtttagggagaaaggttggagatgaaatagtttgatggggtttaattaattagaatatattagaagggacgtttttgtggttggggaaggaagatgttagagttgttgggaggaagtgggagaattgttaggtattagtatggtttaggaagtttttgattattgtagagtgtaggggtaagtgaagaaaacgaaaattaggatattataatcgttttttttttaatgaggaaatatattacgtaagttgggattttttatttgtagttatttttgtgaatggatgatatttttttataattttatattgattttttgtattataaaggaattaatttgttattatttgatattatattgatttttttatagttatgataattttggagaaaatttttgatgtttttaaatatataaggagaaggaaataatatttaattatttaattagtaattattattttattttttttttatataaaaatgtggtgaggttgggcgtatagttgaatgaaatttaaaagagttagttgggtatggtggtttatgtttgtaattttagtattttgggaggttgaggcgggtggattatttgaggttagtagttagagattagtttggttaatatggtgaaattttatttttattaaaaatataaaaattagttgggtatggtggtacgtgtttgtaattttagatattcgaggggttgaggtaggagaattatttgaatttaggaggtggaggttgtagtgagtcgagattatattattgtagtttagtttgggtaataagagtaaaatttcgttttaaaaaaaaaaaaaaaaaaagaatgtggtgatataaagaattttattttaaattttatgtttaagaataattttttttttttttttattttttgtgtgtgtgtgtgtgtgtgtgtgtgtgtgtgtgtgtgagagagagagagagagagagaaagatagatagggttttattttgttaattaggttggagtgtagtagtacgattttagtttattatagtttgtattttttgggtttaaataatgttgttatttagtttgtttagtagttggtattataggtatatgttattatgtgtttgtatgttaatttatgtatttttttttttttaagttttttagtttatagtatgtttttttttgaggaatataaattatatgttattgtttgttttttattttgagaggaaggagataattatatggttattttatgtttgaaggatttggtgattattgggtttaatgaagagttttaggatgagttagtgtggttttatttaggtatggagaaattaattttttgatgatgattaagtttttttattaaataggagtgtaattgatagaggatttttttatatttgttttattttatggtgttgtttaaatttatgttgtatttttagtagtaaggagtgggattattatttttggcgtttttagatggaatagatattaagtttggttttgttattgaatataatataggattgataaaggttagtttttaggaatatgttttttaaatgtagaaattaatataagattttaattttaaataataggtataatagtataatatattattttattttatttatttagagatggagttttattttattatttaggttgaaatgtaatggtatgattttagtttattataatttttgtttttagggtttaggcgatttttttattttagtttttagagtatttgagagttaattttttgtttttggtagagatgaggttttattatgttggttaggttggttttggatttttgagtttaagtaatttatttattttagttttttaaaatgttgggattgtagaagtgagttattatgtttagtcgtataatatattatcgttttttttatatataatttgtattaagttatagatatatatttattttataattttatgtttattagattattttttgtaggttgtatagtgaaaatatatttttagttttaaaagatgtgtgtatattagattttttagatataggtttggttttagaatatagtttattatgatttttgtaatttattttaattgatgtttaatatcgagagagaagttatattgtttttagttattttatgttatgatgtgttattaagtttaaattttatataatagtaattaggaggttgggtatagtggtttacgtttgtaattttagtattttgggaggttaaggtaggtagattatttgaggtcgggagtttaagattagtttgattaatatggtgaaattttgtttttattaaaaatataaaaattagttgggtgtggtggtgggcgtttgtaattttaattatttgggaggttgaggtaggagaatcgtttgaatttaggaggcggaggttgtagtgagttgagattatattattgtattttagtttgggtaataagagtaaaattttattttttatttttaaaaaaaaaaaaaaagttattaggaaaatttatagttgttataatattattagattaatacgaatttttaaaaatggtagagttttaattaagtttaaagagttttttttttttaattgaattttttggatgtgattatatgaaattttgatgaaatatggttataaattatgatgataagttagttttgggggattttatatattattagatattaatgttagaggaagagttatgttaggggtttttagagttattttaggtgagatgatgttttaggaggatttatagggtttattatatggttttatttagggttttgatttattatagtaaaaggatgtaaagtaaatttagtagagggaaaggtatattgggtaaagtttaagagaaattaggtttaggtttttaaggattttgtttttttggagttatataggatatatttaattttttttataaggagttgggatgttatgtgtaaaatattgtttattaggaagttcgtaatagattagtattagggtttttgggggttttgggggtttttgggggtttttgggggttgaagaagttagatttttttagagaaatagaatttattggatatatataggtagatagatgagtggggatttatgttggggatttatttttttaattatggaggttgaggagttttacgttaggttttttgtaagttgttgagataggggagtttgtagtatggtttagtttaagtttgaagggttgagaatcgggggagttggtggagtaattttgagtttaagattaaaaatttggggggttgttggtgtaagtttttgagtgtgaaggttagagaatttggagatttgatgtttaaggggaggagaatataggattttttattttaaaatagagagagagtgaatttattttttttttgtttttttgttttagttaggttttcggtcgattgaatgatgtagtgagttgaaattatattattgtattttagtttgggtaatagagtgagattttgtttttaaaaaaaagaaaaagaaagttatatattggtatagaagatatttttaaattttatttttttggaaatattggttattatagaagatataggattaaatttattttaaaatttttattttgaaattattattataaatgttttatgaattatattagtatataggtaagttttggaaagttaaagttataaattagggatttagatgagtgttttgtgaaatttttaatttttgtagaatattatgagaaattatatattttttattttatattttttgtaggaaatagaggttgtttattttttagtgttatatatgagaaagggaagttgttattttatatatttattgttaagtattttggtaaaatagaagaaagtaggttgggtttggtggtttatgtttataattttagtattttgggaggttaaggagggtagatagtttgattagtatgggtaatatggtaaaattttgtttttataaaaaaataaaaaaaaataaaaaataaatgtagttttaggtattgaggaagttgaggtaggaggaatatttgagtttgggaggtaaaggttttagtgagtcgtgataatgttattgtattttagtttagataatagagtgagattttgttttaagaaaaagaaaaataagagggaggtaatttattttatatttagagaattttatatgtaaggaatttgattatgaataagtttttattgtttaagagagattttattatttgggattttaagaaagaaatatataaataagtaaattttattagtagaggattgagaaattagtgtttataatatttagtgattaatgtaatattgtttttagttattattaaaagggatttagtttaaaagttatttcgattgatcgttaatttagagtttttaatattttattttttgttttatgaaaagaattagtagattaatttagagtttgataaggagaagtaggttttttttgattttttgtttggttaagaatttattttaatatggtattattagaatattgttagaaagttgtgagttaatttagattttttattattgagttaagtcgtgaagttagttgttttgggggtaaggatttttatatagaaatattgtaagtaaataatttagtatttgttttttatttttttttattggataattatagagaattaaaattgtgggttgttttgaatttataaaagaaatgttttaaagttttcgaggaaaaagttagattatttattgtaaagtatcgaaatttaaaattatgttaaggttatagagaaataggattttatttttatttagtggttaatattgaaatttgggtttagaataggaaataagggaatttgttaataatttgggaatattttagtattttttataaaaaaaagttagagaaaaagttaagtatataaaaaatataagttaaaataaatacgattaaatatataggttttggtagtatatagatttttgtggttttgttatgtttttagtagcggttgtaaaaagtattgtatattaagtattgttagattgttaaataaatttaattatattttttgtttggttttttgttttttttaaaattttttaatttttgtgatttaattatgtttttaatgagttgattgtaaaaattaatattagcgaatataaaattttagttagataggaggaataaatttaagatatgtattgtataatatggtgattttagttaataataatgtattgtgtatttgaatattgttaagtgaataattttaagtgtttttatttaatataaaaaatatgtaaggtaatgtatatattaattagtttgatttagttattaaataatgtgtgtgtgtgtgtatatatatatatatatatatatatataaatattatattgtatattataaatagatttaatttttgttaattaaagaattaaatgaatatatatatttttgttgtatagatgtatgagagattgattaataaagattttaaaatatttgttaaaagttataaattgagggaaagttttcgatatcgtatttgtaagaaagaaagtgtatatagttagatagttttagtatttgtaaagtgggtgtgattatcggagagtaattttttgagtagtgttgttttatataatgttttgttgttagggaaatgttttgtatttatttaatcgagtcgttattagttataggtggtttttgagtatttaaaatgttagtagttggtgagacgaaggggttgaagtttttatttaattttaaattaaggtagaatcgtttataagagaaagtgttaaagaattggaaaaatgaaaaagaatttgagaatttagtgggaatggagttaacgtgtatggttatggtttattagatttggggatatcggaattttaatagtataatgggtttattagaaaattaataaggttataaaataggttaaaggaagtattaaaaatagtttaattttagtagatatagaagttgtaaatttagtagtagttttggtaaatttttaatttatgtaatttaatagtgttagggattaaatcgaaggggaatgttaagataaaaagtttataaacgttaagagtttattttttttagaatatatagaaatagggtatttttatattttcgatttattttttaagtttaaagagttttgttttaaaattagatttttttatacgatgggataaatagttttaatgtttttttttttagatttgttttaatttgtgtttggagatattttgtatttacgttaaaatagtttagataaaggataatgtttaggaattttagaaattttgggatataatattaatggtaatttttaattaggaaaatttaatttaataagaagggttattttgaatattagggtatgtggaggggaaagtatgaaggtggaaggttatgaaatattaatgggagatatagagaattaagaaagtttttatggtgattttttttgtttttgggtatgttatttgaatttacgattgtaattgtgggagttggaaaagtttttaagaatttttagaattttatttttttataaaataacgtaatatgaaatagtgataaatttttaggagaatatgtaaaataataattatgataatattgttggagaaatttgagataaagagtaggattttttaataatttattttggttagttaaaagggaggtggagtttggaagtgaattgtgaattatatcgatattaagaaaagtagttaattttgaagtagtattaagtggtagtgattattttaattattttaaatatttaatttaattatgaaaaaaatgtgattagtattgtatatgatattatttttttagtagaagattttgttaaattaatttttgattagtatttatgtattaatttggttgatgtattttttttaattttaataaattatatttattaatagtttgtttttatttggtagttttaatttttattaagttgttagagtaaatttttttattttcgaggtataatttattgagtaaaatttaaatagtttaaatttaatttaagaattaatattgttttattattttaatgatatattaattaggagtgatttgaaaaaagttgtgtttatgaggaaattttttggggtaatagaaatattatttttattgtagtagtagttatataatgaatatgtttgttaaatttataaataattgtatagttatggttttattgtatttaaattatattttagtaaatttgattttatttatttatttatttgtttatttatttatttatttatttatttttgagatggagttttattttgttatttaggttggagtgtagtggcgtaattttagtttattgtaattttttttttttaggtttaagtaatttttttgttttagttttaagtagttgggattatagatgcgtattattatatttagttaatttttgtatttttagtagagacggggttttattatgttggttaggttggttttaaatttttgattttagaagattcgtttattttagttttttaaagtgttgggattataagtgtgagttattgtgtttggtttgaatttggttttttttaaagtaattgtattaaaaatttttgttttttattattaattttatgagttaaaagaaatagattataaaagagtataaattttggtaaaattttggggagaaaaattttgtttaagattaggtaaaagtttttgtgtttgaaagtttttaatttgaaaaagaggaatagaaattaattggcgtgtttgaattatgaagattgtatattttatatttgtattaaatttgggtttttttattgaattatgtgggtttttaaaagagttttagagttgtgttgtttaatatggtagtattagttagttatttgtggttatttaaattaaataaaattaaaattgaattttaaattgagttttttagtgtattagttatgttttaagtgtttaatagttatatgtgaatagtggttattatattaaattgtataaatgtagaatatttttattattatagaaagtgtttatagatttagaggttaaattgttttagaggttaaataggtatatagattattggagtttaatgatttaagtattgaatataaaattaggtggtatatgtttttgaaaatttaattggttgatatttttaattattaaaattattttgagatggttaggtgtagtggttaatgtttgtaattttagtattttgggatgttgaggcgggtggattatttgaggttaggaattcgagattagtttggttaacgtggtaaaattttgtttttattaaaaatataaaaaaattagttgggtatgtatttggggaatttatttttaatattttaatgtaggttttttttattttttttaagtgtcggttagtttgagaaataaagagaaagagtataaagagaggaattttatagttgggtcgttaggagtgatattatatattagtaggtttatgatgtttatttgagttataaaattagtagttttttattaaggattttaaaaggggagggggtgtataaatagggagtaggttataaagattatatgttttaaagggtaataaagattataaggtaaaaggtaaagtaaagattataaggtaaagggtaaaattagaattattgatgagggtttatgtttagttgtgtatatattgttttgataaatattttaaataatagaaaatagggttcgagagtagagaatcggtttgattttaaatttattagggtggggtttttttttattttagtgagtttgagggtattgtaggagattagggcgtattttagtttttattttaatcgtataagatagatatttttagagcggttgtttatagattttttttttaggaatgtaattatttttttagagtattaattattaatattttttgttaggaaaagaatttagcgatattttttttatttgtacgtttgtttataggttttttgtaagaagaaaaatatggtttttttagtttaattttataggtagttagattttatggttgtttttttttgttttttaaaatcgttgttattttgtttatttttaaggtgtattgattttatattgtttaaatatatatgttttatagttaatttgtataatagtggttttgaggtgacgtatatttttagtttgtgaagataataggattaagagattaaagtaagataggtataagaaattataagagtattatttgggaattgataaatgtttatgaaatttttataatttatgtttagagattgaagtaaagataggcgtaagaaattataagagtattattagggaagtgataaatgtttatattaaaatgaaatttttataatttatgtttttttgtttcggttttagttggtttttttatttggggtttttgatttttcgtaataggtatggtggtaggtatttgtaattttagttatttgggaggttgaggtagaagaatggtttgaatttgggaggtagaggttgtagtgagttgagattgtgttattgtattttaatttgggcgatagagaaagattttattttaaaaaaataaaataaaattaaattaaattaaaaagttttgatttacgttgtaaatattttagtggtgtattaataaagttagaggtttttttagatagttagatattttagaggtagatatatatgtagaggtaattaatggtggttttacgaggaaagggggtagttattttatgagtataagttttagatatttagtttttaaatattttaaaaaataaaataatttttcggggagagattttcgagtaaaataaaatagtttatttgtttttagatttttgttataatgttttgtttaaaggtattggttaaggcgggtggattatttgaggttaggagtttgagattagtttgattaacgtggtgaaattttatttttattaaaaatataaaaattagttaggtatggtggtatatgtttgtaattttagttatttaggaggttgaggtaggagaatcgttagaatttggggagcggaggttgtagtgagttgagatttattattgtattttagtttgggtgatagagtaagatttttttttaaaaaaaaaaaaaaaagaaaaaacgaaaaaaaagaggggttgtttttatttttttttttttttttagttgattggaatataaatatgaaagttggaatttaagtagttatattggatttgagagagaagagttatgttgaggttggtggaagaaaaagatagatagaaggaatttgagtttttgatatttaaatattatattagttttagggttgtatgtgagagagaaatgaatttttattttggtggagatattgttgtttttagggttttttgttttttatagttgaagttaattttaattaagtagaataagtataaagttattaaaatataaattggagtttgtaaagtatatgttatttttaagtattagatatagtaaaatgatgagatgttttttttaagttttggtttaggattttttttaatagtttttcgataagttttttgtttttttagtaattatgttttgtatggtgttttttttaatattatgttttttcgtggagtttattagtaaggagtaagtgagattttttttatttatttaattagtgaattttaaaaattgataaataggataaagaaggaatattagttattgttatgaatgttaataagatatttgtttagtttaggattattttaattttagaagggatttgtatagatttatttgtagtaataaattaataataatttagtggtaattatattttttagttttttatattgtatttatagtttttaggtataagttttagtatttttaaagtatttgtaatagttataaaatggtttttttatgatagtaaagtggtggtaggtatttttatagttaaggggtgtcgaatacgttttatgcgttttttttttattggtgaatgttatgtttgatagtgatgtaaatggaatagttattatgaaaaacgtgtttatagtttagttaaagaaaatatgtaagggtaatattgtaggagggtggagtgtaaatatatgaagagtttggaattttgatggtattattaaatgtttaaattaatgttggaagttgttatttttagattttttatgagaaaaatgaatttttgtttattttagtttttgttttttgggttgtttgggtttgtatttgtaagtatttttgttggatgtagtaggttttaggaggtttttttagatttagggtatttggttgttttttttattttgtgtttttgtttattttttttttttttttttttttttttttttttttgatagagttttatttttgttgtttaggttggagtgtaatgtcgtgattttggtttatcgtaatttttgttttttaagtttaagcgatttttttgttttagttttttaagtagttgggattataggtatgtgttattatgttcgattaattttgtatttttagtagagatggggtttttttatgttggttaggttggtttcgaatttttaattttaggtgattcgttcgttttagttttttaaagtgttggtattataggtgtgaggtattatattcggttatttttgtttatttttttttttttttttttttttttttttttttttttttgagatagggttttattttgtttattagattggagtgtagtggtatgatttcggtttattgtaatttttgtttttttggtttaagtgatttttttgttttagtttttttagtagttgggattatagatacgtgttattatatttggcgaattttttgtatttttagtagagataaggttatattatgttgaataggttgatttcgaatttttgattttaagtgatttatttgttttggttttttaaagtgttgggattataggtatgagttattgtatttggttgtttattttttacgggatttttttagtttagagtagaggtttttaatatagtttgtattttggaattgtttggggaaattttatataagtttttttgtttacgttttaaatgggttgaatttagatttttaagggtgagtataggtgggtatgattatttttaatagtttttttagattagtgatttttaatttttttaaattttaatttgaaaaaaattttttaatgttttaagagtataaattttttaaattattgaaaatattgaaaagttttatttataatattgttattgatatttattgtatttaaaattagaattgaaaaagatttttaatatgtattaattttttttaagatagtaataataggtaaggtttagtgggttatatttgtaattttaatattttgggaggttaagatgagtagattgtttgagtttaggagttggagattagtttggataagatggtaaaattttgtttttataaaaaatataaaaattagtcgggtatggtggttggcgtttgtagttttagttatttgggaggttgaggttggagtatcgtttgagtttgggaagcggatgttgttgtagtgagttgagatcgtgttattgtgttttagtttgggcgatagagtaagattattttaaaaaaaaaaaaagtaataataaattatttttgtatatgtttaaatttgtttataataaaagtaaataaaaaggattttaaataaattacggaaaatgtagatttttaaagaattagaagattattagttttatttggattatgagttaaatatatatatatatatatatatatataaaatttataaaataattttggaaatttgaatattgattggatatttgatgataataggaatgattattaaaattgtggtaatagaattgtgattatattttaagagtaaattagtaaaatttttaataaagatataaggagggtttatggatttattatgtatagtagttatagtgtttagggtttataatatttttatggtaatgtttatattttttttaaaatagaaaaaaaattaaggttgaagaaaatattttaatatataatattaatatagttgtttgtgtattaatataattataagtatgattttaaatttattgtttagaaaagtgtatagggttcgtagaagttataatgtagttttggatataacggttatgaaagtttatgtgttgaattataaagtggtaaaatatgaattggtagagatgtcggtttttgaggttagagaggttatggttatagttgttgaatgtgattttgggttgtttatttaggagattgggtggtagggagagtaaatgtgattatgaaggggttggttgtattacgttggttaaatgtatataaaggagtttgtttagatagaagcgaagaagggaaagtaagcggatattttttgggggttttaggattttatattatttggaaatagtgtttttaatatttttttatttttattaaaaggtattttatatattttttggttggtatattgggtttttagttatagaaaattggtttttagggatagagataatttaagttaagttaattagattgtttttttatgattttgaattatggggtttagagatatagaggttaagagtagttttgttgagcggtgagtatttatattttagggataaagtttatgagtttttgaggtttttagaattgtttttagttttttttattgagttaattttgtttttaaattttgagaaatttaatatttttataattaattttttttggagtttaagttattttgaattagattttgcgatttgtaataagaaaataataatagtaagtatagagttttaatagtattaaaattaaaagtggaaaagggatagtagtatgttttagatattcgtgtgttagtaataattaagatatggagatggaattaagatagtttgttaggtttttttttttattttttattgtaaaggttgttagtaaagggggaattatttttttatagagtaagtattattttattttgtaggtgaagaaattgatgttgaggttaagtgtgtaatttagaagtaaagtatttttgataagttaagggaaggagaatttttagttggaaatatagagaggttcgttgttagttagaattagtgttatttttggttttaagtttgtttaatttatttaaaattagattatttgttatttaaatttttttgtttgagtttttttttttttagggttttaattaaatagggtgttattttttattttttttttaattttaatgtttttgaaatatgtttgttgggtttggggtttgtttgtttttatagatttgtagttttaaaagtaaggaaaatttgtaggtattaatataaataattataattgggaagggatggaattataagaaattttttttagtattagtaatattagtatgttttattttatgaggagagtaggtcgattatttgatttaataatatagtttaggttcgggggagatgtgaatataatgaggaagatatttttatgatttatattttttggtttgaggttttgtcggagtttaagtttgttataggtgaagtggttaagatttggaatatgatttttatatgagttgttgtatagttagtgtggtttttatttgttgtattttgggaaattatttatgttttaggaattaaaagttttttaatttagagtaaggcgtttttaatagaaagagaggttagataggttaggcgcggtggtttacgtttgtaattttagtattttgggaggtcgaggcgggtggattacgaggttaggagatcgaaattattttggttaatacggtgaaatttcgtttttattaaaaataaaaaaaaatagtcgggcgtggtggcgggtatttgtagttttagttttttaggaatttgaggtaggagaatcgtttgaattcgggaggcggaggttgtagtgagtcgagattgtgttattgtattttagtttgggcgatatagcgagattttattttaaaaaaaaaaaagagaggttagataattttagtattttaggaggttgaggtagggggattttttgagtttaggagtttgagattagtttcggtaatatggagaaattacgtttttattaaaaatataaaaaattagttgggtatggtggtattcgtttgtagttttagttatttaggaggttgagggggaagaattatttgagtataagaagttaagtttatagtgagttatgattgtattattgtatgttagtttaggtaaggggagtgagattttattttaaaaataaaaaataaataaaaaaagagaggttagagcgaagtatataaaatggattgatttgtttttgttaattgagggaaagttagatagggtgatatgttggttttcgttgaagttgagagttgtgtttattttattattttggtcgtgtggggagagttttaaaggagaagtttatgtagatatttttggtttttatttaaggattagtaggataggttttttttattgagatggtagtttgttgttagtgttagtttttatgaaattattttgaagatgaaagaaaagataatagaaggttagttataagtatttaaggtgatttttgtttattttaggtttgagttgagaaatatagttatggtttatatatgtatagtttgtgaattgtatagttcgatagaaagaagttttagtgtggttttgatgttttttgttgattatattatatttgtaggaaaatgggttaaataattataaaataaggtggttattagttattatatagaaatttatttttgaggtagttggagttttttgtttgtttgtttgtttgtttgtgatggggtatttttttgttatttaggttggagtgtagtggtaagagtatagtttattgtaattttaaatttttgggtttaagtgaattttttgtttgagttttttgagtagttgtaattataggtatatgttattatgtttagttaatttttaaattatttttttgtagagaaaaagggtcgtgcgtgatggtttatatttgtaattttagtattttgggaggtcgagatgggtagattttttgagtttaggagttttagattagtttgggaaatagggtaaaattttatttttataaaaaatataaaaattagtggtatatgtttggagatttagttattcgggaggttgaggtgggaggatggttggaatttacggaggtcgaggttgtagtgaattttgattttgttattttattttagtttgagtgatagagattttgttttaaagaaagagagaaagagagagagagaaggagttttgttttgttgtttaggttgagagttttgttttgatttatttttttttttgttttatttttatttttatttgttttggtttatttaaaattataaattttagtatgtaagatagttaagggagggtaagaatagttttgtgtagtttatggttttttaggatatgtggtgtttttaggtatagtgatataagtggtttgtaagttatttttattttattttataagttattttttaattataagttatagatgttaaaaatataagtttaaagttgaaaagtagttttaagggtgtgataggttagaggatttattttatagttttttttttatatatgattttttacgcggtggtttacgtttgtaattttagtagttgggagatcgaggcgggaggattatgaggttaagagattaagattatattggttaacgtgaggaaatttcgtttttattaaaaatataaaaattagttaggcgtggtagtgtatatttgtagttttagttattcgggaggttgaggtaggagaattgtttgaatttgggaggtaggggttgtagtgagtcgagatggcgttattgtattttagtttgggcgatagagcgagattttgttttaaaaaataaaaaaaaatatgatttttttgtgcgttttattttaaatttttttttttttcgttattatgttagcgtataattttattatattatttgtttttttaaatattatttatgatttttagtttttgggtttaagtttaattttttttataagtagttaatattttttagaatttggtttttttaataagagtttatgttttgttttaattaaatttaaagtagttttttaaagtttttgttttttttttttttatttttttttattttatttagaagtttttattgtttattagttaatggagatattgttattatttataggtttagaggtttgggtatttgttttgtttatatttagttttattttaaaatttcgtttttatagttttgtttttaaattttttttatttttttttagagtttggttttagttttttggaggggaggaagaagttagttgttaagagaaggttgtgggtttggtttttttaatagtaatttggtatagattttttcgtgaaattgttagatggggttggttggtagtattgtgtaattaaataggtttttgtggattggtttggggatttagtcgtcgtatataaatgttattcgagtgattgtatagtattgtttttatgtagaaaagttttcggaatttagagtatttgattaaacgtgatttttgggaaagtttttttgttgttcggggggcgatttttgcgggtttggttttagttgtagaaagagcgttaaagaaattttaattttagttcggttaggttgggagtgggtgcgggagaaatagatggggggtatttatttagatttgatttttttttaatgtgattttgagagggagggaagggggtgtttgaagtttttgggttttggatattgagatggagagtatgggtgattttagaaaatttatttattatcggatttttgatagatgagattaggggtttttttttttattcggttttcggggttagggggtttagcgggtgataagggagaggcgtttgagggatcgggattatttagttgattcggtgcggggtcgcgtttttagcgcgggtattagggggcggtagaggcggaggcgttagcgtcgaggagaggtttttattttcgagaagttttttcgcgtattcgttcgggttagagtggtcgtttagacgtttacgtggggttttttgcgatcgagaatgggttgggatcgggacggttaagtcgatgttgtcggggatacgttgggaggaagaagtacggggaggaggggcgggggcgtagtttattcgggttcgggttcggggtgaagggtagttttgttaggttcgtttcgaggtcgcggatgcgaaatcgggatataaaggtacgtatttttgattttggcgttcgcgaggaagagggttgaggaagaggaaattgggatgaggttttggaatacgttttaatgtagcgttttgataggtaggagttaggtaatattgtttgggaatgtgaagttttatgggtattagttagggggtttcggttgcgcggttagttttggaagagaggattttttggatatttaattcggagggagtagagtttttgagtgtttaggagagggaggttagggaagtgggggatagttaagagtggggggatataggtagggattgtgcgattttatttaatataaagatttaacgagtatgtacgtgattatacgtgagtgtggagggtttggttatagttttgtttttatgatagtatagtataaggttgatggggagggataaggtgattagaggtatagatgtagtaaatgttttggaagtgggttttagtttttttatttatagagattagattgggttatgtagtatcgttttatttatatttagaagtaatcgtatattcgtgttagaaattggagttatagggattttaaatttttatttggtgtttttggggtattgtttgtaattttatgttagttatttaggttttgtaaattttgggttttgatattttagttggatagggtttgtagggtatttggattaagttatataattttggtaattatttagttgggaagaggaagtattagatgggtgtcgggggagattgaaataataatataagtagtgatatagatatttgggaggagataattatattatttaattattagttagtatggaagttgggtatagggttttgggagttttttttatatgttatatattaattttttaattgtaggattagggaaagtgaggggtgtttaggggagggataggggtggtaatgaatatatttagtggtttagggttatggtaatttattagttaatatagaagaattttaatattttagttatttgcgggatgtagttttgtatatattttatattatttcgttttttttttgggggagtattttggtttttaagtagtaggtagtgtttgttaaatttagattaagtggaagagatagtgggtatatgggttaggtagttaatatttgtgggttagagagttttattttggtagagttagagttttgaggttagggagattatatattttaatttttatagtgggtgcgataggtgaggtgggaggaaggtgggagggaggtggggtttagttttgaaatttttttatatatagttattgaggaaagttttgattttaggatgtgggtgtcggagtttattttcgagatttttgtttttaatatttgttgatttttgttggcgttttttttttttgttattttgttttttatattttaaataattaatataattatttttaaatataaaatacgttatgttttttttttttttttttatttgtttggggtgattgggaggtgagttttaaataagggttttagttttttaacgggtaataggttttaggtgggagggttaagagttttagatgttatttttttcgtggggtgtttaggtaattattttattttttttttggtttgtttcgattgagggttttttacgttttggtttagggttttttagatagtgaggagtttttttgggaggtggtatagagttgatgttgtgggattttaggtgggtttggtttcgaatggataggattagatagagacggttttattttatgaagtagataggttttagtagtattttttttcgtttcggtggggtttttaggtttgagaaggaggtatttagtattggtagttgttttagtataggcgttcgtatttttagtatcgttcggttttgttgtgtttttagggggagataaggaagaaagtgtgagtaggatggaggtattttttattttttaattttaggtttaggtttattttttttttgagtattttggttttattagggtgatttaggatgtatagattggtagtgtttatgtgtttatgcgtgtgtgtttgttttttttttatcgtgtgtttttgttgggtagttatgtgttagtttgtgtatacgtttgtattaatttgtgtgacgttggtgtttgtatttaagtgaattttattcgatggtttttattttttttattttttttatcggtttttgagtttttttaggtatttttgataatttagtaggacggatttttttttgttttttttgggtgttttgtttaaggggtttttttattttttttttttagtttgagtttgagattagtttttaatttagttttttttgtttttatttggtagttatttttgaattttttgatataggggttagttttcgggtttagtttatttttattggttttacggagttttaggggatcgttacgggttgttttagagtaggggtaggagacgttttggtgggttgagacgttgagtagtcgtaggaaggtgagttggattatatttattggggagttttttgagtttacgtaagagaattggaaggagagagagggttggttttagagggggagagagagggttggttttagagggagatagagacgggttttaggagtatttacggtattaggatagttgagttagagttatgagtagggaatggttggaaggtaagggttgggaaagaagtgaggggttgagtgggagttaggagattgggggtatacgaaaggtaaagtgagtattagaggatcggtgaaaaggaaaagaagaaagagttaagaagtggagaaggggtggtaggtttcggggggggtaatagttaggggattgttattaaaatttagaaattattaagttttgagggggtgtattatggggtaggggaggggtagcgaggggttagtttttatttgcgtgacgttatttttaggcgttatataggttttattttttgttgtgaagttgtagaaaattcggaaggtatttcgagtatagttttggttggggtcgatttagtatttttttgttgggtgagggagaggggaggttagggttatttaggtttaggttttaagatgttttttgtttttatattttttttttttttttagttttttttattatgtttttagttttttggttttttttttttttagagttttagaatttagttttattgttggattttattgtagtattttattgttgtagtttatttttattacgtgatatttttgtttttaatagtaattttaggttttttgattggaggaggttcgagtatggatagttttatattgggataatatgtggttgtaggcgtttatatagatttatttgtttaggtgtaaataggtgtgtgtacgtatgtatgtttatttgtttttgtagatattgggttgataattaattggtatatattgatttagattagttgttaaagtattgggatatttttgatttggttagtaaatagttgtagtttttagttttttagtttttatttttaatttaatatttttattaagatttttttagtatttattttgtttgtttagtatttatgttgttggggagatgtttgtgtattttgaggttagtattgattatcgggaagttttgggtggtatagttttaggttttggtaggtgcgagtagggttgttttgggtttttgttggtcgttttatttgttcgattttttttcgtagggagtcgagtgagttaaagattttttttagttttttaggattgtcgggggttttttcggtcggtatggttttatttttttgtattagacggtttttatttatcgagcgtcgagtttttttgggtatttgaatgggtagtggttggattatttcgtttgggggattttgggtgtagggatagatggagagggtaagagataaggttggtgtgagggtgaagtgtggtagtagtggagtagaggggtacggttttgggagtagttttgattttttatttatcgggtgttttggagggttttgtatattttttttttttttgggttcgtttgggttttgataaggaataaattaggttatggaggggttaagaggttaagtatggattaaggttatagaaagattaaattagttttttggttggaataaggggttttttggggggagtttatttgttttggagagatattattaagtttagagggggtggagtaaaggttagagttgaagggggttatttattgtggtttttttggtttttttggggttagtaggtttttgtgaaatgaggaataagaaagagacggttattgtaggggaaggataggatttagaggagcggggaggtaaggttttaagtttataggagtttcgggttattataggaggggtagttttgtgggaatattaggatatttagagttttggaagtatggggaggaggtattggtggtgataggataaatgggggattttgaggattatgtttgttaggttggtagttttatggaagtcgttgggaggttgtgggtgggtagtagaggggtttaggggattttgtggaggaatagaggtagtatttacggggaggtcggggggatttttaggattaatggggtcggatgtttttgggatattttaggaagggtagtggttggtttaattgggttttttttttatatttttttgagtatttgttcgtttatttatagttgagttttaattttaattttatttttttttattttatttttaatttttataattttcgggattatgttttttatttattattttatttttttgtttaggggagttttgaggtttaggaagttttcgattttttttttttttttgtttattcgggggtttaattagtttaatgagatttgggtggttttagagaagggtgtaggtagttaagagaatgtaaagaggagttatgtggatgggggagaagggttaagaggatatggagagggagtcgggtatagggttcgtgagtggtttttattgagtagggattttttgggattggttgtcggaggtttgaagtagagtagtgggtatttgggttttataggttttaggggcgagggtgatgggagagatatttggttacgtgtttgtttgttatttatttttttttttttggttttagtatcgtttcggagattaggtagttttgggggtttttgtggagagatgggaagttatttttttaagggagaggtgggattaagttttttttaatagtttttattttttttagggttttagttttgttttagggtattgtttttattttttatttagtttaattttagttatttattataggatttgggggtttagtttggtttgtagttttaggtcggttttgttgattttgaagatttgagggggttataggggttaggaggagtatttttatattgtattttttttatggttttttatttttattttagtttagtttttttttgtagtgatttattattgagtttgggagtttttttagattattagggttaggtttttttgttgggtttgtaggatttatcgggtttgtttttttcggggtatttatagcgttaggatttttttgaaatatatataaggaatgtgttttgaatggtagaggagtggggtgtgggtagggggtagagggtttaaggtgggaggtaggaggtagggaggaagggttaaattttaggagtttttagcgtaggaataagtatagggaacgtttgtttttataagggtttaatatgggagaggtggagatggggtgggtatttggagacggaggtatttgaggggtgggaggcggaggggatgttttagtattagggtagtttgttttttattttggtttttttttttttttgtcgtttttcggaattaggcgagttagtaggattttgtaggtggagtgggaaggaagagtatatgaggtcgtgggtagttaggtttaatttttttttttttttgttttagatatatatatatatatgtatatatatacgtgtatatatagggatacgcgtcgagggtcgatttatagatgtgtagaatagatatagttgtgatagttgtgaaaatattgggtagtttgtatatttggtgaagggttatttgtttatattttatttggtggttcgttttttgttttagaaattaaaaaggtttatttttggtttatagaaaagttggttagttttttttttagtttttattttgttttgttagtaattattattatttttggtgaaaatatatatattagaatttaggaataaatatgttcgagatatcgtatatttattaatttattagtttttgtatatatattcgtttagtgtaatgagatatcgtatatttttaaatttattagtttttgtatatatattttgtttcgggtaatgagatattatacgtttttaaatttattagtttttgtatatatatatatttagggtaatgtagatattaggtatttttttatttattttatttgttattgtttagtttttatttatatagtttagggattgttttttaaggttttaggggtttattttatttattcgttttttaagtggttttgggggtttatttttttcggtgggattaggggatttttagggagagaggaattggggtggttgagtgtttattttttagttaagggattttttaggagtggggtatagaagaggggtaaagaggatgaggtttgggtttaggggggtggtggggttattaggtatttataggttgttttggtttattattttcgtttcggttatttttagtattattttggttttgtagaagtgaagtaaggttagaggtgggtttttaatttggttggtattatttttaaaattgttaatattttatttttttgtttattttgttatattttcggttttttaatatttaagtttagcggttatatagaggatttttttatagaagttttattttttttgtttttttttttttttgagtaagatttattcgagggttattttttttaggggggttagggttattaggaaaattaataggattttgatttagatggagaataagagttagggttatagttttttaagtttatttagtatagacgtttataggtatacgttattgtttttttagaggtagtgtttattagtattttttaggaagaggttttttgtatttttttttttattacgtgtattgcgtgttgtttaattttttaaggtattaattgtagggtattttttatttttttttcggattttagattttaggtatttttttggatgttttatttttagagtattttttaaattttcgggttttttatattttaagatttttttttatatatatttatatttttaggtttgttatttatagggtttgagaggatttagtttttattgttttaaatttatagggttttttttggggttattatcgtttgtggggtttttaggttttggtggttttggtttttttggttgtttcgatttttttttttttttacgtttttcgcgtggattttgtagaataagcggaggatatagatggtttagggaattttgaagattagggatgtagtttttgttttcgagatatttttagttattttttattttttttagtgataatgggatatatatagaaagttaagtttataaggggagttttttagtttttttttttttaagaaaggggaagaagggtttatttagattagggattaggttttatagaggatggtagggagtagagatttttgttgtagaggagttttagtttaaggaggttataggaaaagtggaggtagggttgaggcgggtgacggggattggggagtaaggttttggagttgttatttattttgatatttggttcgttttggatttttggagattttgatttttttggttttttttgtaaagagattagagttaaaaattttttttttttttttagttaaaaaattttgatattttttatattttatttttttttgtttttttatttaaaattggtagaaatttaatttttattttttatttttatgattggtttatttattttttttttagttattttttttttagggggatttaggtttttaatattttttgggggattttgtgggttttggaagaggaatagaaataggtgttattgtttaggatggaggtgttattttaggggtaaagttttagatgagtagtttaaggttatagtagtgaggtagtggaggtttttcgggagtaagggttttttttggtttttgagacgatattagagtttatggtttgggaaagggaggtagaagattagatatattggttttaagggataggggttgagatgatttatattagcgttattgggtttagttggatttcgaggttttggggggttaggtggtttttgggggaaatagatatattatagatgaggaagggaagtgagatggttgagtatgaatggtggagagaggaggaggagtagttaggttagggagttggtagtggggtgtggggtgggggttggttagggaggggggtgattagtatggtggttagggttagtaggggttatatttattataggatttatattttttgttttttttttttttttagaggggtttggtaaattttgtgtaagtatataaaatatgggtttaggtgacgattttatttaaagtatagttttaggtagataggttttatagttttttttttttagatttcgtaggttttttagtttgtatcggtaggttgttggtagagtttggggtaaaatattattttattttgattttattttttagtttttgttttattttttaatatatttgtaggttaatgggttttgggggtttattgaatttttttgtttttttattatttttggttttaaagtgtttttggggttttcgagtttcgggttttttatttgttttttgtagggttgagggaaagtagagataaggatatagggatgggttatgggttaggtgttttttatttataaatattatatatagttgggtgttaggtttagagtttttgtttttatttttagttataagggtagaggggagttgagggaggattagaggttgttgggttttcggtgggggtggaggggttatttatcgttgttttaggttgttttataggattaatgggtttagggggtttaggagggttttgggtaagagaagagagttagagatattaaaatagggagagagattaggtgggattgaggttaaaggttaggaggttagaagttaaggttatggatatttatatgtttatttttgttttttttggtgtttttttgttcggggttttttattttattttgggaggagaaggtagataagatattagagaaaggtgatgggtagagtgggaaggatgatatgataggggttaggggttatgtttaggttagttattttatttggaaagaagattggtcggggtttgtggggtttttttattttgtttttattttttttagttatatttggaggtttagtaggattaggaagttttataggattttgtattttatttcggttagtcgggttaatggggttttttttattttgtgggataggaggaaggagttatggtttggaggtgatttttatttttaaatattttataggaaatttgttatagtttattaattttaggtttatagatttttttttagtatttttttttaatatttttatatttattgggatattttttttttttgttgttttagggggattttgcgggtttgggcgttttggcggattaatgggtttttttgattttgttgtatttcgttttttaggggagttttgagaaagtagatggttagatttttaggaaggagatattagttcgtttatattagagaattttagattataatttttaaaagtttttaaaattagatgtattttggttgtttttggatagtttttgtttagttttatagtttttggtggtattagaatgttatttttatttttttttatttatttttttttcgggttttttttattattttcggaattttagatttattgtagggttaggggggttagacggatttttatttttttttaaattaggtttattttatgaattagatatttggggaagatgagattttacgaaaagagaagggtgagagttggagagggaagataggttttaaaagatggaagtggggagtgatatggagggggttagggatagggtcggggtggggatttaggatgtttggtgtttgtgataggtaggggtttgggagttatatttatagtagtgtttgggaggttttttttttttgggaatttttttagattagtaggattatttttttttggggttttagggggattagggttattttaaaaggaaaggagaggtgatgagttatagttatgtttttaaattaaatagagagttttttagtttttttttaaatttttaattatttgttttttttagtattttaatttttagtttttttattttttttttgtttggttttttattgatttttgtttttttttttttagttgttttaggtagtttttgttttttagggggtttcggggggtttgggtgattttttttttttatagggtcggttttttttgttgttttttagataaaagtagagagagtttttgtttttaggttttttatttcgttgtttgttagaagagtttattttggttattttaaaatatttttttagaatttttttatttttgttttaaagtttttgggaaatttttcggtatttttgggttattgttgggtttttttttgttttatgtggagtaattatattattttgtgtttttgttggggaattgttttttttgggggataagacgatgagaatgcgttttaaaatagattgaagtttaggatttttgtttgaaattttagtttttattattgattttagttttaggagtttgggttaggtggatcggggtaggggcgtgtgatcgagagaagaggggtagatagattaatgttagggttaggggtttatttttttttagggataaatttatttgaggttttattatttttggaggattaggggggtcggtttttttttggaaattttaggcgaggaagagaggagaatgtagtgaaagtaggtgtgggcgttgtggggtagatttttaggaggaaggattttaggtaggattatattaagttttgggttttgggtttgagtagtattagggtaggttttattttgttaggagaacgtttttgtgggttttttagatagttttggggttaaagggtttgatggagttttttgagaatgggtagttaggagtattatttattattttttttttttggtttgggtgtttcggtagtttattttttttaggggggttttggaaggggtttagttgttaggtgaatttttagttggaaagtaggtagggaagaaggatttagagaagcgaggtgggttagagttcggggttaatttatcgggggttttttcggtttaggaaattcgttgggattttgaggtttagggaggttttagagatagaggtggggggagttaggagaatgggggtaggggttgagtgggggaatttagttttttttttggggtgaggagggagttggtttatttaggttttttggggattttaggggaaggggattttcgatttatatttattttttttttagggggtttatgggggttattattattagatgttttttgtggggggaaatagagttaaggagtgggaagagttgttttttagttgttttcgaggttaggatgttgagggagagttggggttgagtgggtagggggtagttggagttttgtagagattatttattttagttttagattttttagtggtatttcggggttttcgttgatttcgtggattttatagagggaagaggagttgttagagaaatttaaatgtttttttttggattttgagttatttgttttttttttttgtatttatcgtggggtttcgtttttttcgaggttttgattttttcgataggttttggtgggaatgaagtagagagaatattatttagggtgagattttttatagattttttttatatttttttagtttttttttttttacgtttttttattttttagtttattcgggtttttttttttttattggtattaggaaagttaggaaattttagggatttttggtgagaacggagaaggggggaaattgagaagttatgaaaggtagggtttaggaaggggtaaagggggttaggagaggttataaaggtagtggttagggagattcgagttttgttaagaattaagtggttttggataaatttttgttgttttttgggtttttttcggttatttgtaaaatgggggttagttaaattttttttggggttttttattgttttgtatttgtgttttttggaattagggattagggaagcgaagaggaggagggaagaggaggaggggtacgtatggggtatggtattattttgggtttttgacgtttaggatagttaggtagattaggaatatttagtttgttttgtggagggataggaagtagttaggagtgagaggaggtttagatgttattttatttttggagattttaatttttatatataatagttagtttttatttagtaatatattttatatattttagtttttagttttttattgtttgttttatagttgtttgatttttgttgtttttttttttcgtgagtggattttttttaattttagtgttgggattttattttttttgcgtttatagaggtattaggttttttagggttattgtgatttagttgttttttatatgttaattttagttttatttattttatgagggaggtgggatttattttagtatttatttttgttttattaagattaatttttttgtaggttttttgtttattatatttcgattttcgtgtatgtttttttttttagaggttttagggtttattttgtttaggtagttgtagagtagggtttagaagtagagattttgaagttagattgtttgggtataatttttggttttgttttttattggttatgtaattaataagtatttttgtgtttttgtaaaattttagtaaaatagtacgttatatgtttattttataggatagataggacgtattagtatagtatttggtatagggtaagtgttggggagagttagttttggagattatagattttattgttattagatttttttattttagaatttttgttgtttggagttcgaacgtatgtttattttgttttgaagtaatagttattttttaagtttcgttttcgtttaatttttcgtgttagggatttttttttgattttttatatattttttttgtttattagtagttgagagatgttatttatatagatagaagtatgattaatgtatggttatttttaattgattggttgattttagcggcgggtatttatgtttattttgattttagtgtttatatttttagaggatttaggtatagaatttttattttattattttttcgtttatgagttttgggggtttagggtttttagtcggtttagtgcgtttttttggttttttaggattatttttttttttggaattagggattttaatttcgttttgtgtgagagggaaggataggtgagtgttggggattggaggtgggttttgggtttagaggagaaatgggtaatagtgaggttgaggagggttagaggggttttaggagttattgtaggataggaagtttatagggtagggatagtgtagtgatgggagggtaggtatgatatagattatggggttattattttgtaggggttaggtttttaagggaatatagtattggaattgtggagtttggagatttaggagaataaatcggtgtttggcgtttttagagtggaggtttagtagaatacggaattggggttagtgtggggtttttatttattttgttattttttacgtttatgttatttttgaatttaggaaagttatttttattttgagaaagatagaggtgagagggtattatagatgatagagggttggggttttaatgggaattttgagaatataggtggaagtaggggttcgggagttggacggtagtgcggggtaggttggagggaaggtagtgaagagaggagatggtaggattgaggtgttgggaagttgggggtatggtgtttatttttttatttttatgattttttagatttcgaatttcgtttatattttagaattagagaggggatagaagtagattgattaggggatggaggtgggttggaaggattaagtttttaagattttatatagtttttttgattatagttttttgttttttagtttggtggttagttattttgatttttcgaggttttgggtattttagaggtttttgaggtttagagggattttggaagataaaagagaggtatttataaaggggttttagagtgttattgtgggggtttttaggggtggaagaaatggaagtaataatattgttgtttgggtagggttacggggtataggaattgagaatgtggtagagttatatgaataatgagataagggaattttaaggattttgaggttttagagtttgagtggagatttttttaggggataaagatatggaagattttatttggttttttttggttttagggggattttttttttttgggtgattttgggagtaagggatagaaaatgtgattagtggtttttgttattttttttgtatttttttttatattttttttaatttaaattttttgtgatttagtgaagttaattgtttatggataagtattattagtgattttttagtgtaagggttattaaaggagttttgaggttatgtattggggtggaaggttaaggggaattggattcggaagtggggttttatttatcgggggttcgtttgagttaggtatgtcggggagttttggttttttttgaggattttgtaggaagataaagaggtttagggttattagaggggttatgtttggatatagataaaattttagtagatatttagggttttttttatatttttattttaaattttttgttttttaaattatttagttatttattttttttttatgagggtcgatggtattttggggttcgggaagattttatatatagggaaagagaagttataggggttttttagggttttttttatttagtttttcggatttaaagtatgagtaataagggtttgaaatttttaattttttgtatttttttagggttttatttattgtggaagtttaagggaagttatgaaaattggggaacggagtaggggtatcgtttatttgggttttaggggtgttttgttgtttaggaggttttggttttttttggggtttttagaaataggtgattaggtataggttagaaggagatggagatagaatatatttagagtatggagttgagttttagtagcgatagttaagaaggtaagagtaggaagtaggtaggggttaaaatggcggttaataggatgttggtagggatttcgggggataagaatgggggtgggattttttatttattatttattaagttttttttggggttttggggattatttatgtttcggacgttttgaaatataagatgggtgtgagtagtttgaaggtggttcggagggatttgtggtttttagaggttcggttattttcgagggtgtgacggttagatttttaatttattttaaatttaagtaaatatagttggtttaggtttgtagtgtgtgggattgtggatttgtgggtttgtgggttttggttttgttttttttgaagatttattttttatgtttagagtttttagggtattacgttatatggttttttttgtgtacggggagcgaatgttgaggtagggtagtgtggggttagagtagggggagtttatagggaatgggaagtatgtcgagagaggagagggagtaggaaggtagttagaaaggtggagagttggagaggttaaggggttattttagggttagaagttagggagttatttatagggggtttaggaatattaggtgggtttttggggttaaggagatttcgaggtttttgtatttacggtgaggggaggagacggtatgaatggataaaattgtgtttttttagtgtttatgttttttttttggtttttttagagtttttttttttagtattagtttttggatatttatcgattttttaggtagttttcgaggtttaattttttcgttatttttttggaggaggaggatacggtaaagttgttgtgttttttagattttttttgtatttagtttttatatttgttattatatttattttttttttatttttattagggggattaggaaggttttgggtattagtattattttgtaaaatgggggaatttataagaggggttttagagtttttaatataggtagatatcgaatttttgtatttagtttatttattatttttattgagtttttgttaagtttttagttttttttttttatttatttttatttttatagaagatttatttttaattataatatatatttattaatgtatttattttatggtttttttttttagggagttttgggagtttattaaaatttcggttattttaggaggaggaaggatagttagagtgaggatacgattttgtttaagtttatttttttttattgtattttgagttgggggggtgttgattttggggaagtttggagaattaggttatttttaagaaataattgagtttagcgtgggttgaaggttataggttttagggaggggtttaagtttgttatttttattttaggatttttaggtatttttcgggttttattagtatttgttcggttttgggagaataagggaagtgttagaataagtagggtcgtagttttttattttgtaggttttgtttttttataatatttatttatttttggggtatttatttttcgtttagttttgttaggagggtttgtgaggttttgaggttttttggggttttggtgagaggagagatggggtggggttaggaggtatagggaggggagtgagggagattgagttggtgaatagatatgggggtgtagtggaggaaagtggttatttgaggttttaagtttttagattttttttttaggttagggtttttaggttggttttgggagagagaagagaggatggtcgtaaggaaggatatagttaatagtggtttcggagtgttttttaaaagaagtttttttttagaattatttatattttatatataattaaagtattttttattcgagtattttgtttatttattaagggtttagggcgttttgtgtattttatggggttagggggtttacggagcgttagttaggggagtagggggatagtagagttgagggataggtagtgggaatttttagttttagtattttttaaatttatttttttttttttgatttttatttattgtttaggattttttttaatttttttgttaattttaaattaatttaggttttttttgtcgtatatttattttagttaatttttttagtgttttttagagttttttttttttagggaagtagttttatttattttcgtttgttgtaggatcgtttgggtttgagttttttgggtcgttattatagggtttttgttatttttattattgttaaatcggaattgagggtaaggagagaaggtttaggtttttttttaagaaagttatgggatttttttagttagaggttttttttagcgtttttgttttttgttttaggttttgtttatttagtattttttatggtttttagataattatttagaggattttagaaatttaatttttgtttttttttattgtttagtttttgtttttagaaagatttttttttggttttagagtttttgaaatataggttgttttgtttagttttagaagattggtgttttgttttaggttatttaatgaggttttatttttttaattttaaagacgaatttttttggagtgatgatttttgatgatttttagagatttttttatattttttttgtttatttggtttttggtaatatgatataattttttgttttttttattagtatgttttaaaatttaagagataatttattgggagtatgagagatgtgttaggaggattaggagttttatttgatttagggagttttgttcggttaggggggttttggagtgggaagagaatgtaaaagatggggtgaaagataaggggatattaagattttagtatgattttgaaatattttttttaatagaataagtgtagattgttttagtttttttttgagttttttatttttatggggaaaattgagggtgagaaattagattagtattttttttaattagagtttgtttttttttttggttgttgggaagtataattatttttttatttattaataagttatttaataggaaattattgggtatggtagtttttcgtttggatattattagttttttcgaagttttttcgttatatggaggatatttttttattttttttttagggtttttaattgggtttgggtttttttggatgttagggggattaattaatttttgaggaataaaagagtaggggttaggtgtgggtatttagataggtgtggatatttagtttgtggttgaggagtggtttgtgtagaatagatttgggaatttgggaagcgttgattggagggatgttttcgagttttgaggaggaggtttgggtatatgtggggaaggtttagatgagtatatagaaggggtttttaagaaaagaatggttattaggttattgttagatttatcgtagggttttttgggttagggggtttttttacgagtatattttgtggagttaaaggttaaaaattagaggcgataggattagtatatttaattttatttgttttttttatttttattgttttagttttgtgattagtataatttataggttttaatattgtaggtttttttttttttttttttagttttcggggtttatgggtagtttgaaggagatatatatgtagtttttagtggggttcgtgagtagttaggatattaggtttttttttattttaattttaattttgatttttagattttttcgagattattttagttttattcgaaagttttatagtttttttttaaaattttttttttataaattttttaagtttgttaaggagattttagggttttttgtttttttagtttttagttttattttagtaaatataatttttttatttttttgagagttttttttaggaaggtttttagaaatttttagtgtttttgtttgtttgtttgtttttttttttttttgagacgaagttttgttttgttatttaggttgaagtatagtggcgcgatttcggtttattataatttttgttttttaggtttaagtgatttttttgttttagttttttaagtagttgggattatattgggattatagatgtgtattattatgttcggttaatttttgtatttttattagagatggggttttatcgtgttggttaggttggttttaaagttttgattttaggtgattcgtttgttttggttttttaaagtgttggaattataggcgtgagttattatatttggttttttttagggattttaaattatttatttttttaaatttttttttagaggattttattttattttttaaattttttttttagaattttaagaaattttttatatatttattttaatatattataaaagaatttttttaagattgtgggtagatttttatttggggtaagaggagggtatggatttatatgagaatttgataaaagttaggtcgggcgaggtggtttacgtttataattttagtattttgggaggcggaggtaggtagattatttgaggttaggagtttgagattagtttgattaatatggtgtaatttcgtttttaataaaaatataaaattagttgggtgtggtggtatatgtttgtaattttagttatttgggaggttgaagtaggagaatagtttgaatttaggaggtggaggttgaagtgaattaagattatgttatcgtattttagtttaggtaataagagtaaaattttattttaaagaaaaaaaagaatttgatgaaagttgtgagtttttttttagaaatgaaaaagtatatgttattatgtatagaattttatttaggattttaaagggtttataagtttaaatatgttttaaaggttaagtatttatattttaagtaaatttggaggttaggtacggtggcgtacgtttgtaattttagtattttgtggggtcgaaataggtagtttatttgaggttagtagtttgagattagtttggttaatatgtgaaatttcgtttttattaaaaatataaaaaatagtcgggcgtagtggtatatgtttgtaattttagttattcgggaggttgaggtaggaggatcgtttgaatttaggaggtagaggttgtagtaagttaagattttgttattgtattttaatttgggtgatagagtgagattttgttttaaaaaaaaaaaaaattggagagtagtttttattgaatgtattgttttttttttggtttttaagtatattttaagtttattagtttttttttttgtatatttttatttagatatttgtttttaattttagggttagaaataaaataagaatatggagaatgggagatatttattattattttaattttttttaataaagatttttagaatgtttttttttatttttattttgattaaatagtaatgattcgttttaaaattttttgaaattttatattaattttaaatatttagagagtagtataaaggaaaggtagtagaagtttaagggaggtaagagaggggaggtatgggatgcggtagtagggtagaggaggtagttagaattgtaaggtaggtagaagacggagcggagtagataggaagtagttttattgatagggaatattggaagatatgagaataattaagggatatagaataaaatgataaatatttggaagtaagaatgatgttagggtcgaagaaaattaaatatggttaatatggttagaaaataaattggataaataggaagtggttgaatagataggaagtagtgaaggaaagaggatttaggaagtgaatttttaataataatatggttatcgtgatttagagagaaaagaaaggtataaaataggtagaatgtgatttttgtaaagggaattatgatagtgaagggtaatttttttagaaaatataaatattaaggttaggatatataggaagtagttatgagaaatatcgaggtttataatggaaattttatgatttaaatgatttgagatatataggaagtggtttattgttaaaggaaattgttataagatagtatgaaaaattagagttagaatagaaataataaattttttgtagtttaatttgatatagttattaagatggatgttatagttggagaaggtaggaagggatagataataagtggtttgtaggttaaaaaaaggtgatataggaagttagatcgtttggtagaaatatgaataaaaaattattttattaagaagaaatgatagagaaatattgaaaatggatataaggtagtagtttattgattaaaagttttatgaaatttagttttagttagataggaagtgattaagaaagataggaagtggttatatattttttttttttaatttttaattgttttgagttttagaagtatttataagagttataaggtaagatatttggtaaaggaaggtaggtagtaatttttttaagtaatatatatattatatgtgaatagaaaatgataagttatagatgggaaatagtttatagttaatagttaaggatcgaaattaataagaagtaatttttgtagtttttattggtagttaagaatgaaagagaagttttttttatttacggtttttgagtgggttgttttcgtagagagggtagggttaagttttgtttttttacgataattatttttatagttataggtgtaatcgtagggttttttaggggggtttgtgttattttttttatatttttttgtttggaatttgtcggttgtgggggggatttggagatttgtttgtttttttttagggatggggagggagaggggtagatggggatgttagggttgagaggaggtttattttggattttagggtgtgataatttttagtttaaaggattttaaggttaattagaattggatttttttttttaagaatagttatgggagtggttgtatataaatggaagggttattaaaggttaaaaatggggagagatgtttagaaagtgggtttagtgggaagaagtggtggataaaatgaagggtggttagaggattggatgtagagtggatagtttatggatataatgatagataaaggagtttaggaatgattaaagagatagggaagataaaaggtgataatattggatagaaagtggttttcgggaatagaaataggatatagaaagtaagattattagatattaatatggagacgaagttatttaggaattaaagaattatggaaggaggtttggatattgaagggaacgggttggatttagagagttaagtaggtttatagttttagagtgatttaaagatagaggttatcgatggaaatgaggaagaatttttcggttagaggaggggttggtttattaagacgttatgggttgaggggagtgagttataggtgtttattgtttttagatggggtgagggtggggtatagagttatttttttaaggggtggtaagaggttcgattttaggatttttttttttttatttggggtggggttttgattttaaggagagaaggagaagagtagtacggggtgggaaggaaggagaaaggttagtagaagggaggtaaagtagtatttgtttttcgagggtagggtttgtttgtgttgggggatgggggaaattttagattttgtagtttttttggagggggatagtttggggagagtgaatttttaaggttatagaggtttgggggtagagatttggatgtttcggttttatttgtcggtaattgttgtttttggttttggggcggggttaggtagtgggggaagttgtttttcgagttgggtatcgggaaaggggaggttgtttttatgttgggttaaagtttgtagttggagagggttttcggtttggtgagggggacgtttgttaggttattgattttttggtaggtggggtaggtttttagggaggggttcgatgttttttaggggaagggggaggtttgtggtgggggtttttagggcgttgtagtagagagatagggagggggtaggaattaagtaaatttttataatttaaatatattgtgtttttttttacggtatgggggaggggaggaaggtgttttaggagatgattgttgggggtgttgggagaaagggaagaaatgaaggggttttttgagtttatttgataattaggggttgttttcgtagttattatattataataggggggttcgtagttatagtagagagatttagtgggttgggattggggggtgggtatagataggaaggggatggggtaattggaaggtgtggggtgaagggcgggagagggagatataaagatggtgtgggagttgggaaacgggggaggtgtggagttgggaaatagagagttgaagatgaaaggagaggttgagggttaggagggaggtggggagaggtggaatagagggaaggggttttatatgtggggtagaagtagatatgattaagagattgattttttgatttttagattattgattttagagtttatttgtattttaattttttagattttatttaatttaggtttttttttttttttttttttttttttttttttattattttttttttttttgtttttttaggtaggtgggggttagagattgggttttttatttttatatttttgtagatttattttttttttgatattttttttatttttatttttttttattttttttttttggttttattatttcgattgtttttttttggttttagtttttttttttatttgtttttttagtttttattttttttttattgttttttaattttttaatttaaagaaggaagggaaaatttagggatatagttttaggaagattggaagaggagacgtagagtagggaatatagtttttagttataaattttttataataattttttttatttttagatgaaaataaaaaggttgatgaatgaggattaggaggagggggtgatgggaatagggagatgagggtggggaggataattaaggaggagagatgtttgggtgttttttttttttggggtgtgttgtatttgggggtttttttagtttttttatttggttttggggtttttgattttgtggtttgtgaagttttgatggttgttgttgtggagatttttgggttttgtgaggttgttggttttggggtttttttttttggtttttttcgtattttagttttttttgtttatatgatttataggttgtttggatttttgggataatggttagtttttggatattattttgtaaagatatgagagagatggagcggagagatttagagagaggtagagggtattattcgggagaaagagtataggaggttaattttaggtaaaattttaagatgggagaaggttattgttagttttttatatgtatagttttttttagtttttaagggattttataggatttttataataattaggaaagttggtagaataaggatttttttttttatttattttttagatacgttttatttagaaaagtttaaaaaggtaatgattgttttaaggttatttagagtggtagaattaggattagattttaggttttttagaattttttgttttttttttgcgttttgtggtaatgtatgagtttttttatagtggtttttagagatagggtttagttttagatgttttggttttttaatggtagtgatgatgagaattttttggatttttagaaatggagtggggagaatttatttttgagttttaatggtatttatttttgtttatatatggtgtttagtatattttttattgtatcgtaatttagggatgttgttttatttttagagtttatttgggagtttttgggggtgatagagattttatatttttttttttgttttttttgtttagtaggtatttagaaaatgttgattggtttggagggtgaatggagggatgggtgaatggagggatggatgaatggatagatgagtggatgggtggttgggggtttatatgtattaatgaatgggagtattgataaatagtgaatgaataaatgtacgtatgggagggtggattggtgggtagatgaataggggttatagagtagatggaagtaaatgggtgaataggtagatgggtgaatttatgtgggtgaatgattggtcggatgggaagtaagtgggttaggagatgggtgagtgagtatattgaaggagggagtggttgagttggtggaaggataatggatagatggtggttgaatggatgtatgtatttttgtgtgtatgggtagatggggagggtgggtgggtgagtgaatagttggatggaggagttgaagaggatagatgggtggaagtatagatgggtggtttgaaggggagagtggttaagtagggggaggattgataggtgggtggatataagtttttatgtatgattaggtgggcgtgtgatgtatagatgagtaaatagatgggggagtgggtggtggatgtgtgtataggttggttgaggagtgagtgaattgatgggtgggtgaggagagagaggggttgaaaggatggatggatgagggaattgatgaagattgaaggatagagtaagtggttgtggatagttttgttatataggtaggtatttagtttttttgtagagaatagtagttttgaagatagaaaatagaaatgaaaatttataagaaaaaaaaatgaaggtttagggaataggaagatgatatgttggggttagaagggtagtgggtataagataggggattagaagttaattttgtttttgattgttttggttattttaaagatttttttatttagaatacgggtattaaagatgattattttatgggtgtttaatattggacgagtatttcgggggagaggtcgggtgattcgttttttgtagttaataatgagggtgatagattggttttttatagttatagttatacggtgttatttggaaatggtggaagaggtttaagtgaatttttggttgattgaagtaggggagttaatatggttggagagtagtgataagagttgaagttaatggtgataagagtagtaataataatggttattatttattgagtgtttatagtgtattagatattatgtcgttatttttttatttgtgttaattttatttaatgtttattttatagatgtagaaattgaggtttaaaaattttaagtaatttgtttaaggtataggttagtttaatatgtagagaaggttgtatattttaaagtttaaattttggattagaagtgattgaagtttgggtagtgggtaggtgtggtgtggtttaaagggttttaagggttttatagtttagagtgtaggggtttgggggtatttttttttgaaagtgtgggttaggtagattagaggagtaaataaatttatttgttatttgttaggttgaggtttcggaagattggttgagagggaggttgaggtcgtttagtttggtttttatataggaagcggataggtcggtttagttttaggtttagttgtcggatattttgggtattgtagagagttaggaggggagtttggagattagggcgggttcggataatagttagtagagagaaatttttgggaaatttttttagtaatcgagagagatatatatagagtgagaggtaaagggagtcgttataatttttttttttttggtgtttgattttaggttttattttattatttttttttaggtttattttattatgttatttatatttgggaaaagttggcgagtgggtgtattgagttgggtaggtcgtgttattcggtaggttatattagttggatagatgtttttcgtttttcggatattattagggagggaggggaattttagggttcggagtatatttatagggggtgtatttgggagagtttatgattattaggagaagggatatgtttttaggagggtataaataggggatatttgggatttagaatttagttttttagggtttaaattttttgtaagggaaaggttattttatttttatttgtttttgaatagtatttgaatggatgggaaatgtaaaggtatttggaggtagggtagtattagttggtatttaattttatgatatttttgtttttgttttttttagtatttgttttttttacgttttttttttgttttttagtttatgaatttgtttttttttgtattttttgaatattttttttaattttttatttgttttttgttttttttatttttttattttttttgtttttttatgttggtttttttgtttttgttttttttgtttttttttattttttttatattttgtttatttttttttttttttcgtttttattttttttttatattttttattttttgggtttttggtatttgtttcgtttttagtataaataatatttgggtaatcgattattttggatataggaggtgtaggggggttacgaggaagagattagagaagtagttttatgagaggggttttaagtagttatagattttaggtttgggggatggggtgggaataattttgagtatgttgaggaaaaagatataagaaagtttttttaggagtttgtgttttttggtttaggagatgagttggggaggggtggaggaatggggggtaggggttgaagttgttacgaggagtcggaataggtttagggttttgagttatatatttgtggattttattagagtgtttgtttagaatttaggtaagttttttatatttggaattttaattttgttttattatttttattaattttattatttgggatttaaagatttaagatttagtttattagttttgtttaattagaatttagttttttagggtttaaattttttggaaaataaaagattattttgtttttatttgtttttttatatatatattttttatattattagttttagattggaaaaattttaaagagagttttagtaaaatttttatagaagtgtggggtagggtagaggttagagtaattaggagagtggagttgggtggggtgggtgaggtggggcgggtaggtagagaaaaggttttttgagtttaggagtcgggaaattacggtttttttttttaatttttatttaagtttggtttttgcgcgtgtggtagtttcgtaaatattaatatataagggtcgttttgagagacgaagggtgagtgagatagagatatagagatttatagagattttaggttaaggagatttcggaggtttttattttttattaaattttaagggagtataattcgattatatggataatttatttataggttcgtttattatttttttatattaggttatatatttgtttttttgtatttagttttatttgttttataggttttttattggtagttttattattttttattattttatttttggttttttaaatgttttattttttaattttaggaattttatagtaatttatttttttaaagttttatttttatttatttagtttttgaaataagaaatagttattttagttatttttttgtttttatgttagaggattttttttttttttaagaaagatttttagagtttataggtattatacgttttaattttttggttttgggttttattgtttttatattttggaagtttttttttttgtaatttaatttaaattttttgtgttgttattttgattattttttttttaaagtagagaagaattgaatagttaagttaaatataaattagtttttagtgtttttagaaatgggttttttttagtttgttgaggatttggtgtttatagttttttttttgatattaaatttttttttttagaagttaggaattttgggttttgggaaaaagaaggaaaagattagggttgtgggtattagggttttaggggagtttggttggttagagggaggaggggttaggtaggaatgtaaagagttggttttggttttagatatttgattttggtttgttcggagggtcgttttgttggtagttagttttagtgttttttagagttagttgcgtggtagtatcgagggtatagggagggggagggggattttgtttaggaggttaatgagataggtagttaaggttttttttttttttgggtttattgggttttgttttgaattataggtgtttattttttattttagagatatcgatagaaaggttataagatatatacgttttatttattaatattggcgtttattatttttatattagtaatgattggatcgggttggttttggttatttttagttttttttaaggatttaagataagtatttatttttatttagggtttttaaagtggttttttattttttagttttatttgtttttttttagttattttaaggataaagagatttttattttgatgttaaggaatataggtgttttgttttttagtttgtagttttgaagttttaaatttttttgttagatttagaagttgttgttttaggtattagttggtttttttttagagatatttagagttttagtttgatttcgaggatttaggtattaggattttttttatttgtttagtttggggtcgcgtttagttttagtattagaggtaggaggaggaggaggcgatggtagcggttgtatcgttttatggttgagaagtcgaaacgtcgggttttagggatttaggtcggtttgagacgttggatgttttgaggttgatagaagatagggagtagattatgagttttagacgtcggggttttagggaggttagaggttgcgggtagcgatagttgttagcggtttagttttatgtagtaaggcgtcgtcggggttttcggtattgtttttttttcggtggttgtcgtttttgtgtgttttcggttattttggcgtttagagtttttatttcgttttcgttttcggttcggttttcgtttttagtcgttcgtttatagttatcgaagggaaattttatttttagtttttatttggggagggaggcgggaattttttttttatcgttcgtttttttttgttttttgtaggttttaacggtttgtattttaagatttttttttcgggaattttaatattttttttagttttttttttttttaggatttaaacgtttagttatatatatttttttttatttttttttttttgggggtttagagtttttttttagtagaggtttgggcgggatttagggtatagtgggagggggagaggcgggtttgggggtcgtagtttttattttatttataattaggtttttataattattttttttatttcgtttcgtgtaattatagagtcgggtcggggcgggggtatttatagataaggttatagatagcgacgaattggggcgggggatgtgggggaaggtgttttacggagagtaagaggttagagattgggatttatcgataaatataggatagttaggtttaaggagatgtaaatgggggacgcggttagggagttttagagtcgaggtagagggggagtagtggtaagatgagcgagtagtcgattttggttggaagggtttagggaaatggggttattcggggacgtgggtcgttttcgggcgggtaacgtttgagaagtacgtagcgttcggcgtttagtgcgtttttacgagcgggtacggcgtcgggtttgttcggagttcgtagcgcgttcggagggaaggtcgtagcgagtcgaggcgtcgtcgttcgttggcgcggagagggtacgagcgaataaggcgtttttgagaatttatcgttttttttttttttttcggtcggtttcgtttttagtttggtatatttttttttttttttttcgataaagtttgttttgtgttttttattttgcgtgtattttttgggttttacggaatttcggcggcggcgtttagggatcgcgttcggagtttttaatcggatattttttttaagttcgaaacggcgttgtttatttttatatagttattttagtttagaaaatagcgattttaatttgaaagcgattttatgtatgagaggggaaaggagttttaaagagaagggacgtagggtaaaaattatgtagttttagtattttatttttgcgggttggttatttttttttaatttttaggttaggattttgtgtttttagtttatgttatgtgtttagggttggaggagagttgtaaagggaaggttttcgggattatattcgtgaaattattttttgtgggggttttgtttttatagtttaggttttttttttaagttagataggaagagatagggggggcggcgggaagttgggaaggttagtgtttggagagttttagggataggttattttagggttttgttttttttaaatatttatttttattattggtattttttagttaatttgggaaagtatagtatttttttgagtttaattgtaagtttttatttttataggaaattaaaaatagtagatcggtttttatatttttattagtttttttattattattattattttttttatattttagtttgattgtagaaggaggtgaagtgtaaaaagagattttggatagtgatagggttttttttttttttagagaggtttttatttgttaggtttgagaggaggaaggtttgttagggttttatttttatgtttattagtttgggaggtttgttttttagtatttatttttgggggagttttttatttttattttttagatgggaagtaaaatgaggtaagatgagaaggaagtaaggttttggaggtaaggttagtgttttgtgttgggggaaggatagagggtgagaaattattttaaattatgggagaattcgataaatttagagatttaaggttatcgaagagagataattagtttttataggtatttggggttttttttaatttgggatattaagtagattttttggagggtttatgtttttggttttgttttgtattttttattttattaaggttttgggaatatggttttttattttgttttagggtttggagttttttttggatgtgtgtttttttagtgtgagaagtattacgtttgggtttgagtttaggttagttgatggggagttttaagtatttttatgaggaaggtgtcgatgggggtgttattaatgagtttgaagaaaaatagatgttttagatatttaaggttaatggatcggagggtaggaagacgtagtagtagtttggtaaatttggggtggaggtgggagaaggggattgagagttggaagtatacgggttttgaatatatttttatagtattttttatttttaagggagttttagtgttttttagttttattttatcgtttttgttgtttagggtatttttgtttgtagtaggtttttagtgatgtatatattttttttcgtaggatttttattttattagggttggagaggtttttggtatttgggatggtagggaagagaggaggaagagaaatgaagataaattaaattaggatggttatgtagatgtgagttataggatgttttttttgggttgtatttgtttgttttttattagaggtttggtaagggaagtagggtttattgggtttgtgggatggattcgtggatgtgggttttttttcggttagttgggagatttttaggttgagggttttattgagggggatagttgggtaatttaggagtttcggagaagaggaggttttaaggttgttttggttttgagagataaaggtaattttttttttatttggattaaatagaatgattgtttttaggtagttaagttttgttttgtttatttttatgttacgtattttggatattagttttgttagtattttggagagggatttgtaggttatttaaaggttatagtttagttagttttggatacggattagtttatagttttattttttttatttatatgttagtttagtcgagggttattgatcgattaaagatggtttttatttttgttgaatgggttgagttgcggtgtacgtgaagatttgtggtaaggaggatgttatttcgaatattaatggatcggtgtgagaaggaggtaatgaggagtttattttagtttgggtggggtagtaagggttaggagttagaaattaggttaagggatttaaagtatattagtggaagagaaggagaaaagaggtggcgaggttagtaagtttggttttttgggtacgtaaggtaaggttattggggttattaaagatcgggaagttaaagaggggttaaatgttaagaagttaaagggatttaaggttattgatttgttcgtagtaatatgatttgattatttagaggtaaggaggaaaagtgtgggatttttttcgtttatttaataagcgtgaatagttgtttgttagttgtttgatagatgttagttatagggttatttggttgtaggggacgggggtaagagttatggaagattttgagatatgttgggagtttttttgtaagaggtttttgatattttttttttatatatagtttttttgtgagttttatttaaattaatttttgtaagtgagtttttttttttggtattagtgtaaataattatttatttgggatatgtttatggttttgttagtgggttgtttggggagtggagatagaaggagttattatatttattttagatgtttgaaagattttgtttggtagtatttttagttttaagtagtgttaggaaggttatgaggggaaaggagggggaggggatgtagaatagatttagattgttttttttaatttttattacgaaggagagtggattgattttaatatttacgttgttgtcgttattttcggtttttttaggatttttaacgttttggttatttttttgttttatagtaagttttgtttttaggattttgtttataggtattttttcgggggtttttttagttttttttttatttttatttttgtttttttttcgttgacgttttttttgtatcgttgtagggggaagggggagagaaaaaatggaaagttagtagttagttatgaaggggttttataaatatttttacggttttattaggattttatggtttttgggagatatttataggaattggggaagttattagaaagggtggattgggggtagttttgaaggaagggttataaaagggtaggtaagttagtcgggaagggtgaggtaggtaaaagaattagggaggaatttaaatggagagtttattatatggttaaaaaaaatatgttaagatttaatttgagaaagttgattgaaaaaaaaaatttttttaaataaaatatgttaagaaatatgttaagtatattttattatttatttaattattataatgatgttggaagtatttatttttatttttaagatgaagaattcggggtttaaagagattagtttgtttaaatttatataatatatggtaggttatataattgattttaagtgtgtttgagtgtaaattttgtgtttttttgatttaataaataggtagtgaaaggagtattggtttaggtttttgaagatgtgggttttgattttaaatttgtttgttatttttttgttgtatgattttgggaaagttaagttttaggtttattttttttaaagtgggtgttttgattaagatatgttttaaagtgttttttagaattttaggaatttgatttaagaagataagatggagatatagaagaaggaagggaagttttgaggtttttagtaaagtttgtaagtttaagagtgtttagttttaggagttagaggaaagattatagataataggagatagagattagagaaggtttatggaattagaggaggaattatttaggttagaaatggggagatagtttattatggttaaggaaaagttattttattttaggattagtttagggaggggttatatgtgtaggttatagaggtttaattattaagaaggaaatttaagggttagaatagggtaatagggaggagagttgcgaagggagagagaaattaaatatcgttttttagaggagagagagtagtttatttttttagagaggtatatagtttgagtgggataagggagaagggtatgtggtttaagacgtttgggtagggcgggtttttattttttttttttatgttagtggttaggtatttttgatagcggtagtattgatagcggtttcgttggcgtttgtttattgtgtagtttttgttgtttcggtaagagtatgtaaggtttttgcggatggtgcgtttgaagaagtttttgtaatttttatagttgtaaatttcgtagtgtttgtttatagggaaaggggaggagtaataagaaggttgtatggagatatttttattatttagtttgtttttaatttttttttagtaaaatttaaagttttttttgtttgttaaatatagagatagggaattaggagttgagtgatgatttagttttagtttttttattgtttagaaattttatacgttgtttttttttttttttgattttttttttaatcgcgttttatattttagttttagtttttttatttttattaggttttttttaggttatttgttttgattaaattttataagttttgggaattttataggtgatgatatatggtttagattttttttttttgtttattttttgagttatatatttgagtttttgttttcgtagattgtatatagtcgtttgttagttttagggttatttggagggggtggatagtgtaggtttcggatttttaagattggtggttttatatttttaggggggttagatttatttttagggagtgatattgttgagttaatttgggatgggggaaatagggaagttataggaagatttattgggaagtagaatgttatagaagtgatggaaattattttttattattaagtaaggttttgtaatgtatattttagaggttgttatttatattgtagtttatgtgaaaggttatttttggagtataattttaaagtgaataaataggttttttttgaaattgtgtaatatagtgattttgaagggtaggtgttttgggaaagtagatgggattaaaagggtagaaaattagatagatgaaaaggatattaagaatattagaattagtcgggcgtggtggtaggtatttgtaattttagttatttaggaggttgaggtaggagaattgtttgaatttaggaggtagaggttgtagtgagttgagattgtgttattgtattttagtttgggtaatagagtaagattttattttaaaaaaaaaaaaaaaaaaaaatatatatatatatataaaaataaagaatattagagtttttttaggggaggaagtatgtattgaaagattagttattttaggaaaggtaaggggttttataaagattataggtttgataaggttagaggattggaaggttaatgggttatggggaagtttatataaggatttggggttataaggaaaataagaaaatgaaagtggttaggtagtaagttggttataattttttatttgggggttgttgataggttcggagaattttgggggagttggagggggtagattaggggattttatggaagaattgatgattggaaagggagagtttagtgggggtggtggtatcgggggtgggggtggggttttagagtttttaagggatggagttgttgaagggggtaggggtggtttaggaggagaagggggagggattttttggggaaggggatttggggaggagttgtttgggtttcgggagtttgagggaggggtatgtataggtatatagatatataagagatagaagagataaaaaaagaaaatgagtttttaaatatttaattagagattttaattttttaatattttatcgtgtcggatttagtttattttatttatttttaagtttagagatattttgttgttaaataatagtgtaatttcggttggttcgatggtagtgggttattagaatttattaatatttgtgttattaaaattggtatataattttttattgttatatttgattggttaaaaaaatttaaaaatagcgtaattttttattgtggtgagaggagggagttgataaggagaggaggatagtttaggtgaggaaaattttttaattaatttatttgaatgaatattaggttattttaaagttatatttgtttcgtgggtggggtagtacgtggggtagattatcgagtttttttatttttagcgtaaagttaggtagttagagcgtgtaagggaaagagataggtaggagagattttttttaagacgtaggatttgtttgtaaacgtttaaagttttgaggtttaagaggaatcgtgttttttttaggttcgcgattttcggtgtttaaggttttaagcggttatagttaggagggcggaagtttttttttttcgtttcgtttcgggggggagggtgttaaggttttcgggagggaggggacgcgtgtttataaataagggggcgggagcgtaaggaaaagagtatcgggggagggtgtgggggaggggtcgtagataaagcggttattggttcgtttgtttttttgttggggtatttatttcgttcgttgtcgtttatttcgtttcgtttagttttttttggtttcggtttcggggtttgttgtttttcgtttgttatcgtcgtcgtcgtcgtcgttgcgggatttagttagggtcgtcgtcgtcgttatcgggacgcgattttataatgtattttttttcgtatttttatcggtttatattgttttgcggtatgtcgttgagggaggaagggcgggcgagcggtttaagatatgatttttggttgagagtagggatatcgaagaggttttagggatttttaaggattgatcggaggattagttgagtacgaggaagtttttgagagaaagattttggtttggattgggtcgaattaagttcgtcgttttgtttagtattaaaatgatagcgttaatgtggtagttatttttgtatagacgggaagtttcggcgcgagttttcgttttttcgtttagttggaaatcgaggaggcggtttttttcggtttgttagttcgtttcgtttattttttttttaaattatttttatattcgcgtatgcgtgttagtgtaggatggattcgtcgttatcggagtgtcgttatattggtaaaggtattagggcgaaggtggaacggaattttttgttttcgcgggatttaaaggcgggattgttacgtttaagtaaatcgggaaaggagaggatttcggagtcggtgagaattttttgttttttttttattattttttttaggttttttttttatttaatgagtcgtagagacgagggtttagagagtttgtaaagtggttggtgaaagattagtgttttagggttttatattcgggaggtggttcgggataaagagaattagttttgggaataatgtaggtgggaatttaagggaatgggagagcggtttatagaggtggacggagggcgcgattggagtaaagcggattttgtgtaggtatagagttgagttaagtggagttattgtttttgtttttttggttagcgtgatggttagaggtttgggggttttttattgggtggtcgtgggattgttgatttgggcgattttggggtttttggtggttggattcgggggttatgacgatttgtacgacgatttgtaagaggatttttatggttatagttataggtatttatatgaagatttttattatggttatagttatgtttatggttatggttatatttacgagagtatttggtatggatatatttacgattacgattatggatatttatatgaggatttatattatggttatagttatggttatttttatgagagtttttattatagaggatatggatatgattatgagtatagttatggaggttatggggagtttggggttttaggtattaagtaggatttggatgttgttattttttgggtttatgtgagtttttaggggatgggagagagaagggttggttttggattgttgggaaattttatagtatttgattttgatttttttttattaggtattgggggttatagtgttgattttagtagttttattttttgtttttttttttattttcgtggagtcgaatttttttcggtatcgttttttattttagattttgtttagttttgttttcggtgggtttttgggagatgtttttttgtattttattttttatgtttttggtaagtaatttttgatttttattttaaatttaatttatttcgttttttggaggaaaagggtttttttttttttatgatttttgatttttcgatatttttttaaatatatatttattgtgttagatatttttttatttggtttttttttttttttttagaattttatttttattatattttggagtaattcggatatggatatttttatagtggtgaggaagagatagatggggatgggagttggggtgttggggaaggttcgtttttttttattttttatttttcgtatttgaggaggaggagtttggaatgtatattttttttaatgttttaatgtttttatttttaggttagggttttattttgtttgtgggattgtgggtttttagtggaattgttgttttttttgtcgtggagaaatttgtgagatatgtgaaaggaggatatggttatagttatggatatggatacgtttatagttatatacgtggaagttatggatatggaagataaggtgagtttaggaataatttttttgaaagttgatttgtttgttttagaatttttttattttatggtttttaggagggagaggatatgttggaagatttgttttttattttgattaatttttttttttttttagagcgttttattaaggagaagtagagtttagaggaagaagaaaaggaaataagaggggtttagaagaggcgaggagggagtatagtatttaaagatgggttagtgagattttagaacgttgaagaagaaaaaagaggtttaggtaagggttagagttggtgataaatttgggtaagggatattattataaattatatggaatatgtgttgtgggtaatggtaggtatttgagaaatattaaaggattgggtgtaaagtggtttttgaggggaggtgtgagaatagttgattaagattggaataagtggtgatggaagtttttgattattttttttttttgttttgtataagatttgcgtgtgtcggggtatttgaatttggttgttgatttggtatataattttattgatggtttggttattggggttttttttcgagggggtcggggattagggattttgattataatgattgttttgttatatgaagtgttttacgaggtcggagattttgttattttggtttagtttggttgtagtaaaaagtaggttggtgatgtttgttaaatatagttgttttaaattttttatttttttttatttattttaaatttaaatagttttttattagttttaaataatttatattgttattgataagttttttagaaatgagggggaagaagttttggttattttgttttttagtttagtattttttaaattggtttataaattatttgaatggtttagtggagttttatatatatacgtttatttaattagaaagtttgtggaaaggatttttgattttttaagattttttagaaattgtttattttagattgtttttttttttttttttattttgatgtttagtttttaaatttatgttttttatatttatattttattagttatttttaaattattgataatttttagttattggtgagtgttttttttttttttttgtttattaggcgatgcgtttgtaattattgatagtagtaggggtattggtaggtatagtttgtgttttttttattgaaggaggagtagtgggtagtgaaattgtaggtggtgtaggttttggttgggttttgttatttattgtaggtggttttatttacgtagtaatagtgtttgtgttgttcgagttgttgagggaggtattattattgtaattatttttggaggtgttggggttgttggggggagttattatgatggtgttgattgtttattttgagtgaggggtggataaattatttttgttttaaatttttatttttaattttaggttaggggtgcgtagaggttgggggttttggttagggatatttgttaaaggaaggaattgtagtttgggagaatggttattttggtattagggtttttaagggttggtagttttatagaggttggagcggtgagaatgagaggttagagggattatagtgttgggtattgtttgattatgttgtatttggaaggttaaatggggttatgaagaaggttggaagggatagggggtgatggtagtttatttggtgttttttattttatttgttttcggagaattaagttgttatataggaagttttttaaggtttagtttttttttttttattagttggtggaggttttagggaagattagagttttggatagagagggtaataggaggagtcggggataaatattaaatattaatcgtgtgttttgatttgggagtgattggggggatggggtgggagagggttagttggtatttttatggtttgattttttttgtttttattttttttatattattgtgtttgaatcgagggggaggggtggtaatcggaaataaagattttcgatttttcgttttatatgtagtttttgtttttttggggggaatggggttttttgttttttttatattcggggtttttaagtagtagtgtcgggttacgttttttcggtgggaggtcggtttgcgttggtggtcgtagatggtttaaggttggcgggtttttgattggtttcggttttgtttttgttacgtttttttgcgttgggattggtttagtgttgggatttttatttatttatagttcgttatggcgttttagttttagaatcgatttcgtttcgtattggttttggttataggttgagggggtttttttttcgggcggtttggggtattggagtgaggttaggggcgtgtttttggagtgcgcggtcgttgtgatttttggttttttatttatattttattttttgttttgtgatttttgatttttgttttttttttttcgtgttcggttcggcgtgttttgttttattttaggtgcggggagcggtatcggtcgagcggttagtgtacgtttggtcggagagggggttatcgtagttgtttgcgatttggatcgggtagcggtataggagacggtgcggttgttgggcgggttagggagtaaggaggggtcgtttcgagggaattatgttgttttttaggttgacgtgtttgaggttagggtcgttaggtgtttgttggaataagtgtaggtgaacgttaggttattttttttttttaaagttttgatattgtttttattgtttcggttttttgtggggggtttttgatgcgtaattttttttttttataggtttgtttttttcgtttattatttgtcgttgtgttttgtgcgggtattatttaggatgagtttttgttgtatatgtttgaggatgattgggataaagttatagttgttaattttaaggtggcgatttttgaatttgcgacgtttggtttttttagtttggggagggagttggaggagggttgttattttagttgatttttttttttttgttattttttttcgttagggtatttttttagttatttaggttgtagtataagttttggtgtttaatggttgtcgtggttttattattaatattagtagtatcgtaggaaaggttaggttgagttggacgaggttagttagttaagtggtatagagaggagaatttttttttgagatttttgatttattttatatttttgatttatttataggtggggaacgtggggtagataaattatgtagtatttaaggttggagtgattgggttgatttagatcgtagttcgggagtttggacggttggttagatgtttgagggtgttggggagtatttggggggtttgagggaggtattagtatttagttttttttagaatcggtagttatttttttttttatagatatgggattcgttgtaattttgtttttttagggtttattgtaatatttatgatatagaaagtgttatagaaagtggtggataaggtaggaggttgtgggtggagggtagaattatttagagatttaatttttttgggttttatagagagagagagagagagagagagagaatattgggtatagtttttggtaaatattaaatatttaatgaatgtatgagaaatgaagataaaaaagggttatagatttagtttttaaaaaaatttataaaagaagtttttatttatatgagtatttttttatagattattgaaatgatttcgatgggatatttgggggattttgagggtgagtattgaatgtagtggggtttttgggaagggggtttgaatgaagagatttttaaagtttggggattttttaggggattggtggttggtgtttgtggagaggtttgtggggagggatgtttttggtgggagattatggttgttttgggtttatgggagtgagtagaattttgttttttttttattatttttatagatgtggtagatgtggtcgtatttttggtatttgaagatagtggatatattatagggattttagtggaagttattggtatgaggttagtatggggagggagagggtagagaagtagaatttagattatatgagaaagtaagtaaggggagtttggagttattgggaagggtagaggtttttaaggttagggatagaagtgggtattttttagtttatttgtgtttttatttatgtatttgtttaaatgtttttgttttttttaggaggtttttttatgtaattgttttaaggattttggattttgtttatttttttattattttgtttggttttttgttgatgaggattttaagtttttaggatataaaaggggtggtagtgtatggtttaggaatgttgaatatgggaagtaggggtgtttgtgattttaataaattttaagtttttttttttgttattttcggttttttttgtgtttaagtttttagatttttttttattttttttttttttttttttttcgaaggattgttttttttttttgtttggttttttagggtaattttcgtcgtcgggtgtgagaggaaagagtatgtgttattgtgtatgcgtgatatttcgggtttttttgaagggaggggttcgtgcgttatttttttttattggttttgtagtattagttttttttttttaattttttgggtttttatggtttttaagggtgatttgtttatggttttattttggtgtttagtttggttttgaaagggggttttggaataggtggtttttttttattttttttttttttttgagttttttttttttttttttttttattttataatagttgtagtcggtttggggtcggatgggggggattaggggagggggttaggattaggggaatgaattagtcgatgaaaggggttggagagagtaggagggagggggttgggaagaggaggaggaaggggaggggggtttgcgttaatcgattttggcgtttatataaggattggttacggattgaaggagaggatagggaagtaggggggaattggggtggggggcgagggtatttattgttgttttgttttagggataggttattttttggtagtcgtagtttaagttcgggagttttagttcgggcggggataagatgtttattagggtttttaattgttttttattttttcgttttgtattttttttattttttatatttaatggggatcgttttgtttttttttttttttttttttttttatttttttcgtttattttagagttttcgaagaggtttttgtttattttttattttagatattttgtttttgtgtattttatttatacgcgtattttttttttttaatgggagttttattttgtgtatgtttttgttttcgcgtggtgtttttatttttttttttttttcgtgcgtttttttttttttttcgtttcgggtcgcggtttttgattgtttaaacgtaattttcgagtttatggtttcggtcgagagttgagtttggacgtttcgagtcgtcgtttttaaatttcgagcgggagagcgggtcggagggtttagggagagttaaagtagagggtggagggagtttttagggtggtaaggggaatttcgggtatatcgggatttaggtgtgtttttaggattagaaggttaaagcggtagattttttgtagttttttttttcgggattttggaatgggggttacggagaagtgaggggggttgatttttagagtcgttagggtacgtagagtgggggaggtagttttttttacgagttttttgtttttttttggggttttagatattttaggtttcggtttttcggagttgaggtttcgcgtgggggtttttggaagggaatcgaggttaaggttgttggtcgcgcgacggtgttgggtcgggggcggagatcgtggttttttaagtggcgtagaattttcgggacgtaggatttttacgcgggacgagttcgtttcgtgggcgggagaatcgcggcgtttacgtttcgttttattcgcgtcgcgaatggtgggtgacgttttcgtcggcggggggagcgggtgtagcggaggagtaggcggaagtgacgtagggttttagcgttcgggttatggcggcggcggtggcgggagttgttgtttgagtagcggttgcggatcgagcgaatttggtttaggagttcgggtttagggagaggcgcggcggcggcgggagcgcgaacggttggagttgggtgaggggtagtgtcggcgcgggggcgggagcgggggcggagaggggcgtttttggaggggcggggtttacgcgaggggcggtttttttgacgtttttttttttttttttttatttttagtttttttcgtttttttttcggttgtggagttttggtggggggtttgcgttcggttattatgacgacgtcggcgaatgtttagaatgttagtaaaacgtgggaattgagtttgtatgagttgtatcggatttcgtaggtgataggtatttttttttttaggtttatttttttttttaaatttttatatttatagatcgtattatatagtttttttttcgtaatttgttttattttgttttgtttggttttatttttgaattattttaatttttttaaagtattttcgtatttagtttatttaatttttaaaatagttttgttagagaggtggaataagtattattatttttatttgaaagattataaatataaaaattattttttttgttttttatttagtgttataagttagtgtatataagatttattttgggagtttattaaaagtagagttttatgttttttaatattttgatttagtagtgaattgggtttttagaatttgaatttttaataggtattttatggggttttaatataggtagtattaggattttaaaaaattttgttgaatagttttttttaattatagatttgtgttatttttatttttaggttatttagttattttagatttttttattttaaagtttttatttttagttaatggatattaaagtttgttttttttttatttgttttaagttattagttttttttttttttagaatttttgttttttatagagattaatatgggtttttttattgtattttttaaaatttttattttatgggttgttgtttttaaaatttttttttttttaatttatattatttttttatttattgatgtttttaggaagttataatggatggtatagagattgttgttttttttcggttattgtatttagaatttatgtgttttatttgtttggatatgttgaagaatacgatgattattaaggagtgtttttatagattttgttttgattgtattgttatagttttacggagcgggtaataggagagatatgtttgagatgagatgaaggggtataaagttagggtttttttattggttttggtttagtttaggttttagtttttttgattgattatttagggtttttttttttttattttaggaataaggagtgttttatttgtcgaaagaagttggtgtttaagcgatttttacggttagattttaattttgatgttttgatttttaagatttattttagtcgggaggaatacgaggtttattaagatcgagtgtttattcgtttgagtcgtttgtataattagtaggtattgagttttagtattgaggaggggttacgtatgtaggttatgtataggtgtgagggttaggagagaagtagaattgatgggatgggttcgtgggttagtttttgttgtttgttagtttttaagttttagtattttaggagttgattatagattgattattagggttggaaattatgggtgtaaattgtagttttttagtaaataattggttttgttttttttaagaaaaatatagggttgggtatagtgatttatatttgtaattttagtattttgggaggtgaggatgggaggattatttgagtttaggagtttgagattattttgaataatatagggaaattttatttttataataaattaaatatttagttgggtatggtggtatatgtttgtagttttatttttttgggaggttgaggtaataggattatttgagtttgggaagaaagtggatgttgtagtgaattatgattatattattgtatattgtattttagtttgttgggcgatagaataaggttttgttataaaaaaaaaaaaaggaaaaatgtagtttattttatgattttttagaagttagaatagtagagcgattttgagaataagtttcggatttatattgttggaagttaaattattttttaggttagtattttttagttttttatgtgtatttagattatttgtagatttttagatgtaaattgtgatttagtaggtttagagttgggttcgagagtttgtattttataagtttataggggatgtgtatgttgttatcgtattttgagaggtgatagtttatgattattaataagttatttaatttttttaagttttagtttttttagttataaaatagaggtaatataattatttgtgttataggatttattgtattaggtaaggggattggtgtaaaatatttagtatattgagtgtttagtatattgtgtttaataaatattaggtatcgttattaggattttttttattttttaattttttgaagtttaaagtttaagttttttattttggatgttttttaattttaattatttgtttttatagggtttagcgtgtgaggcggtcgatattagggttagattagattataacgatgagtgggggggaaggagagttcggggagggagaaggggatggagaagatgtgagtttagatttcgtttttgattttgttttaggttttgtttttaagcgatttcgtggagggggcgtaggggggagtagtgtagggatagggggaggcggtattggtggggtgggtgggggtgtcggttcggaagattttggtgatcggggagggattttgggagggggaacgttgggttttttaagtttttttggggtttttagttttttagagttaggtggagaaattgagttcgtgtttcggttttattttttgttcgtggagaagggagaatattgttagacgaggtgaggagttttgtttttttttagttattgagaaattaaagattatttagatttttattagaagtgggttttgtttaaatttaaaatattattttaatttagaatttattttggaaagtttttatttttagtttttatttgaggcgttttggttttaagtttgtttttttttttattttaggtatgtgaagataattgggaatgttatagtggattatttttttaagtatttggttttgcgtattgttttcgagcggaggtaatagtaggaagtaggggagttaggagggtttggagggggcgtttttgatatcggaggatttgatgggtgtggcggggagggtgggggtgtcggaggaggtgacggttttgaggagtttgttttgtttagtttggagggcgttagtgaaaagtagtatattatttatatcgtatttggaggcggggcgtttacggtgagagtttttgagggtagtggtagaagaggggagaggagggagggtggtttgggttatatagaattatgagtttggtttaatttattagtattttttttttatatattttttatttttttttatgttttttttttttttttattatttatgtttttttttgttttatcgtttttattatttttttttttttttttttttttttggttattttttgttttttatttatttttttttttattttttttaattttttttttttttttttttttttttttttttattttttttttagacgttgaatggttcgttgattttggagttggtgaatgagaaattttggaaggtgtttcggttattggagttgtgttatgtttttattaaggatttaaagtgattttattaggggatagttagaggaaggggattatggggtatttttgtgttttggtttattattttagtttttttgttttttagtatttttagtttagttagttaataagaggatataaatgaggatacgtggtttttatataaagtatttatatgagatttttttatattgtatagagtggggtaaaatacgtttttatttgttgttttttttattgttttgtaacgttttatttatacgaggtgttggagaaggtgaagaatttttttatttacgttcgtttattaataataaacgtgttttttttttttttgaaatttgtagttttgtgtgtttgtttattaggggtgtataagaaaaagaaaggaaaatagattggggagggaggtttagaaataatgtaaaattagttttggaaatggggagaaaatgtcgggttattcgagatatgtcgtcggaaattttaaattagtaaatatgtatgaaaataggaattatttatgaagttggaagagaggataaaaaatagaggtgttaagttagattttaaatttttttttttaaaatttgagtcgtttaggttgaaatttagggttttaatattaaagggaaagtaggaaaatggtttaaaagagaaagggatgtgtgtagatgtgggaatgatcgtgatgtttggaagttattgcgagtagtcggtttttatagttggaaagagggagggaggtggagaggattgcggagaagttttttgttcgatattttagttttcgggttattttttaaaaaagggtaggttgggttgtagattcggagtgtgagtgtatagtttttgttcgtcgggtagcggggttgagcggagggagggtcgtttgggaatattagttttgtgttcgtttaggtagcggttgagagtagaggagtgggggtattaaggaaagtcgcggttgttttattggtttcgagtttcgcgagcggggttgggtattaagtttgaggttggggggataggggcgtacgattgtattttcggttcggggtagtgtaggtattcggggaagaggaatcgtttttttagaatcgattgttgttttttttattattcgtaatttttttgttttttattttttgttttttttgttttgggtatttttagtttttttggttttaaattttttttttatgtttagttttttgttttattggtagaggagtcggtcgtgtttttttttaaagttcgtttggtttttttagtttcgtagttgcgcggttcgttcgtcgattttatggtttttttttttatttttgggatttttcgtttgttcgtttttttttcggtatttttaatttcgtagatgtaggtgggtattttttagttttagtaagtattgcggattagttgggttggttggttttttttttgtagaagtagataatatttatttttattttcgtaggagtttttttttatatttatttttttggaattcgtgattttgattttttttttttcggattttaagtatttaggacgtgtacggtataaggggaagttgtagtgggaggtaggtgggcgttgtttttggagttttagggtagagaagtaggtggggaggagttgggtgagatatagaggtggaagttaaaagtttggagttaatttgattttttttttggttttaggggttgtcgggatcgtttgtttttattttttttgttttttttagttttaattattcggtagttttttttttgtttttgttgttcgttttgtttttattttgaaatagtttgttttttttcgggtttttagtttttatttttgttttatacgtttttttttttatttattatattttttttcgtgtttttttaattttatcgtttggtgcgagtgtttttttgtttttttttttttatgattgaattttatagatatggttgtttatttaggtgatattatgtgggagatatagaggaatttatttttattttggttttattggggtattttttttttaagttttttagttttttttaattaagtttatgttattgggttaggtaaggtgagagatataaagtatgtaaaagaaaacgttattattttgttgaggaataagatatatgtggaatagttgataatgtagaggaatagggtagaggaaggagggttgatatagtattagagttagataaacgtgggtttaaatcggttttgttatttataaattgagttattttgtataaggtattgggttttttttttgtttttttatttgtaaaatgggggagagtaataggttgttttgagaattgagagataatataagtaaagttatacgtttaatagattagtggtttttttagtgtggattttagattagtagtattagtatcgtttgggaatttgttagaaatgtaaatttttgggttttattttagatttgttgtttaagaaattggagatggggttagtaattgtatttttttaagtttttaagtgtttttgatgtttatataaggttgaggatattgaagaagatgttttataaaatgttacggttttgttttatattataaagaatggtaaagggttcgtgtaggggtgttttgtgatttttaagtaggaggattattgtaggttagtagggaggtgaggagcggttttatagaggaggtgggattgggttggggaaggaaatagagaagtttttttgtagtgggtgagggagatggggggaagtttttttttttttattttatttattatttagtacgattttattttttaggttttttagtttttaaagtagagtagattatgtatttgaacgcggaagttgagttttggagtttagagttttagggttttgagggaaggtttttttaggagatttttgtttaggtaaggtttaattttgagggttttgtttttgtttggtagtttttaatattttgggaagttgtttataggaggttgtgttttgggtttttttatttttatagtttattttagcgaggagggaggtgtcgttgaaatcgttaattatttttttagttgggtgtggggtttagtttttttttttttatttttgttttttttgttttttttttttttatgttgtttttattttttttttttttttttgtaggttgggagtaaagggagaggaggaggagaagagaggatagatttagttttttatttattatggtatttttttatttgttagttgttataattaatttttttttaatttttttattcgggatttttatttttatttataaatttatttaaattttttgtttggaatgtggagtttttttttattgtttttattttttttagtatagtttgggtaaggggttttttttttttttttaatataggaagtattttagttaaggggtttatttgattttgtgcgaatatttttatataggtgataggttttatttttgtagaaagtgtggttatagtttttgttatagtttatatttggtttagtattgcggtatatatttgtttgaatttaattattgttattagtgtggtaagggtttttttttaaggttttagttcgttgtagtttgttattttatatataggtaagtagttttacgtttgtgttatttaagtttttttgtggtagatgagggtgttggtttttattttaatttgtaatattagtagtagaattatatttgggggcgtttttattatagtgattagtgaggtaagggttatggatattgtttagggttggtgtagtattagtaagtttgtagaagtaaaggttgtaggtatggtttttgatatagttttaggttggtgtagtattattagggttatattagggataggttttattgtttgtttttgtggttgtggttttatttggaatatttatttgttatgatattaggttttatatgtggagaggaatgagatgaatatagtggggaggtagggaattagagtttttgtggttgtattatcgtttttaatttgtagcgttttatgagggtggtagggtagttttagagatagattttttttatttgtgggaggtataatagagtagagatttatttatttttagttagggtgatttttagagtaattataaggggtagttcgagtgtttcgtttgaatttatttaaagttggaatggttaggtttattttattttagattaaagtgttaagttttaagggagtttttaagttaggaatttttttttggagaagaatttatattttttagggttttaaaaaattttgttttttatataaataagaggttttggggtatttttttattttttgttttttatcggagaaattttattaggttgttttagacgtgttgttgtcgtggatggattagattttttgggatttttttgaagggttattttaaagtgatagtttaggttgggtatgatggtttatggttgtaattttaatattgtgggaagttaaggtaggtggattatttgaggttaggagtttaagattagtttgattaaatttggtaaaattttggttatataaaaaatataaaaattagtaaggcgtggtggtttatgtttgtaattttagttatttaggaggttaaggtatgagaattatttgaatttgggaggcggagtttgtagtggtcgagattacgttattgtattttagtttgggcgatagagtgaatttttattttaaaatagaataaataaagaaaaaaatgtttttaagagtttttttataaaaataaaaatagaaaaaaaatagataatttaatttttagagatttttaggataattttttattattaaattttagttttttaattaattttatttaatttttagaggttattgggttttttttgttttaggtgtttatattatattcggcgtttttatttgatgagttatttttttgtgtttattttttgttttattaggttttgtttttacgagtttattgttattttttatgttatagggtaagtgagattttatttttgtattaatttgttttagagtatattttttggaattcggtaatatttttttttatgatgtattaaggaggttgattattgatatatgttagaagaaattaaatacgtttagtggttaaaggattatttgagagattgttaattatttttattttttcgggaaatgtgtattgagtttattatgtgttaggagttgttttgggatttgggtattatagttatgtggtatagtttttgttttcgaaggatttgatgtaggggcggtttagaatgagtattttaatattgaatttagtatttagttttatttattttatttgttttaatatattttaagtttgtttattcgtttttatttttttatatttttgggttagttattatgtggattatgtggttttttttgagttattgtagtagttgaagaggttgggaatggttttttttatagtatgatatatatttaagagggattttttaaaaatgtaaatttgattgttttagttagtttttttaaatttatttagtggttttttattgattttaggttaaagatttaagtttttaatttgatttttaaggttttgtaaggggtggttttttttttttagttttattttttattatatttttttattcgtgtgttttagttgttgtttattttgtgtttttttttgtatagagtttttagggaggttggattttttgtggaacggtttttttttttgtttttttttttttagtttttttttattttttaggttttatttttttaatagttttagggaagtttttttgattttttttttagggttaaatttttttgttatgagcgtttatattaaggtgtatttttttttagaggtatttggttttgttggagttttatatttgttgatgattatgtatagattgatgtttgtttgttttattgaatgtaagttttttgagggtagggattatgattgtagatgtttatttttgttattttttggatttaatattggatattttataaatagtggttgaatagatgtatttatggtaggatttgggtaggaggttagatattttaggattttagaggtgatgaattaaggttatgatttttttttttgtagttgtagtttaagaattttatgtgttattatttaatattgttattttttttttaatttttggtattatttaggtttatagttttgtttttattttaggttttttttattttgtttgtgagattttttttttttttaattttttagtttttttttttggttttgttttattgattttagaagttagtatggaataatgtcgtaagatttaggatttagaattggaggttaggtgtagtggtttattgttaaaattttagaattttgggaggttaaggtaagaggattgtttgagtttagaagtttaagattagtttgggtaatatagtgagatttcgtttttataaaatatttttttaatttttattttaagtttcggagtataagtgtaggatgtgtaggtttgttatataggtgaatatgtgttatgatggtttgttgtatttgttaatttattatttaggtattaaattcggtatttattagttattttttttgatgtttttttttttgttatttttttttttgatagattttagtgggttattgttttttttatttatatgtgtttaggtgtttttatcgtttagtttttatttataagtgagaatatgtggtgtttggttttttgtttttgtgttagtttgttgaagatagtggtttttagttttatttatatttttgtaaaggatatgattttatttttttttatggttgtatagtattttatggtgtacgtatattatattttttttttttttttttttaaggtggtgttttgttttgttatttaggttggagagtagtggtataatttcggtttattgtaatttttgttttttgggtttaagcgatttttttgttttagttttttaagtagttgggattataggcgagtgttattatattttgttaatttttgtatttttagtagagataggattttattatgttggttaggttggtcgtgaatttttgattttgtgatttgtttatttcggttttttaaagttttgggattataggtatgagttatcgtgttcggtatttttttttttttttttttttttttgagatagagttttattttgttatttaggttggagcgtattggtataattttagtttattgtaatttttgtttttcgggtttaagaaatttttttgttttagttttttgagtagttaggattataggtatttgttattatatttggttaatttttttgtatttttagtagagatagggttttattatgtcggttaggttggtttcgaatttttgatttatttgttttaggttttttaagtgttgggattataagtgtgagttattacgtttggttgtatattatattttttttatttagttttttattgataggtatttgggttgacgttatgtttttgttattgtgaatagtgttgtagtgaattataaaatatttaaaaattagttaggtgtggtggtttgtgtttgtagttttagttatttgggaggttaaggtggtaaggttcgttgaatttgggagtttgaggttgtagtgttttatgattgaggttgtgaataattattgtatagtgagaatttgtttattttttttttaatttttttaatttagttaattaggaatagaaagtaatttttaaagttaagataaggatattagtttttattgtttttatttatttttttgttaagaagtttgaagtgatataagaagaaaaagaagaaataaagttattattatatatagataattattatatatagattgtttattatataaagaaaatttataagaatttattaattattagaaataataatttttttgtcgggggtaaggagaatatataaatattaatatttttatattatagtaataaatagataaaagattttattttaggttaggtatcgtggtttacgtttgtaattttagttttttcggaggttaaggtaggcggattatgaggttagtagatcgagatcgttttggttaatatagtgaaatttcgtttttattaaaaatataaaaaattagttgggcgagttggtaggtatttgtagttttagtaattggggaggttgaggaaggagaatggcgtgaatttagtaggcggagtttgtagtgagtcgagattgcgttattgtattttagtttgggcgatagagcgagatttcgttttaaaaaaaaaaaaaaagaaaagaaaatattatttgttataataaaaattataagatatttaggaataaatataataaagtttgtgtatgatatttatggagaaaattataaagttttattagagaatataaagaagatataaaagaataggaagagattttttatttataaagacggaagtttgatataaagttgataattttttttaaatttaaaaatttagtataattttaagtaaaattttaattagatattttatggaatttgatagattgtttttaaaattttttttttttttgagacggagttttattttgttatcgaggttggaatgtaatggcgcgatttcggtttattgtaagttttattttttaggtttaagtgatttttttggtttagttttttgagtagttgggattataggtgcgtattattacgttcggttaatttttttgtatttttagtatagacggggttttattatgttggttaggttggttttgaatttttgatttcgtgatttgttcgtttcggtttttttaagtgttgggattataggtatgagttattatattcggttttaaaatttttatggaagagtaaatggttaagaaaaaataaaatttgaagtagaagaatatgagattttttgtttaattatatgttataagtttattggttgaaatttagagtgattaaaatagtttagttttggtatatgtatatataaatagattatagtatagaataaaatttttttgaattagattttaatagggtttggatttgtgtttttttttttttaaattttatgtcgaattgtaattttttttgttggagatggggtttggtgggaggtgattggattatggaaatggattttttattgggtgtagtttttatgatagtaagttattatgagattcggttgtttaaaagtgtgtggaggttaggtgtagtggtttttgtttataattttagtattttgggaggttgaggtaggaggattatttgagtttaggaggttaagattagtttggataatatgttgagatattatttttataaaaatataaaaatagtagtcgagtatggtgatgtatgtttgtggttttagttatttaggaggttgaggtgggaggatcgtttgagtttagagggtggaggttatagtgaattgagattgtgttattgtattttagtttgggtaatagagtaagattttgttttaaaaaaaaaaaaaaaaagcgtgtggtatttttttttttttttttttttgttttagttacgtaagatatgtttgttttttttttattttttattatgattgtaagttttttgaggtttttttagttatgttttttatatagtttgtggaattatgagttaattaaattttataaattatttgattttaggtatttatttatagtagtgtaagaatggattaatatagatttttaaagatatgagatttggttataatggaagtgatataaattagtgggaaagtttaatggttttgagttaattggttatttaaataaatatataaaaaataaattttatattatattttatttagaagtaaattttaggtagttagagtaaaaagtaaaattgaaaattatttaaagaaaatataagattatatattgatgatattagaatagagaaggattttttatataaaattttaaaagtataaaagtataagtagttaataaaatgaagaatattatatgattatattaatagatgggggaaaggcgtttgataaaatttaatatttttttatgatataaatttttagtaaattaggtatagaaaaagtgtattttaatataataaagtttatatatgataaatttatagttaatattatatataattatgaaaagttaaaagatttttttttaagattaggaataagataaggataattatttttattatttttatttaatatagtattagaagttttagttagaatagataggtaagagaaagaaatataagatatttaaattggttaatgttgattaggttggtttcgaatttatagtttcgtttttttgtgtattaggatagttggtttgagttattgatgttttttaggtatttaaattggaaagaaagaagttaaattgttattttgtagatgatatgattttatatagagaaatttttaaagatattattaaaaaaattattagaattaataaatttagtaaagttgtaggatataaaattaatatttaaaagttagtagtattattgtatattaataatgtattaattaaaaaagaaattaagaaagtaattatatttataatagtattaaaaatatatatttaggaataaatttaattaaagaggtgagaaatttgtatattgaaaattataaagtattgaagaaagaaattaaagatataaataaatggaaagatattttatgttaatggattggaaagattaatattgttaaaatgtttatattattttaaattgtagattttatttaatttttattaaaattttaatgatatttttatagaaatagaaaaaaaattttaagatttatatggaattataaaagataaggattaaaatggttaaagtaattttgaataaaaggaataaagttagagttattatattatttaattttagaagttgttataaagttatagtaataaaaatagtatggttttggaataaaaatagatatataagattagaatagaggttaaaaataaatttatatattttatggttaattgattttttataaatatgttaagaatatataatggggaaaggatagtttttttaataaatagttttggggaaattggatatttatatgtagaagaataaaatttgattatattttattttatatataaaaattaatttaggttaggtatagtggtttatatttgtaattttagtattttgggaggttaaggttaatgggttatttgaggttaggagttcgaaattagtttggttaatatggtgaaatttattaaaaatataaaaattagttaggggtggtggtatatatttatagttttagttatttaggaggttaaggtataagaattatttgaatttgggaggtagaggttgttaagattatattattgtattttagtttgaagaatagagagagattgtttttaaaaaaaaaaaaaaaaaaaaaaattatttaaaatgaattaaagatttaaatataagatttgaaatggcggggtgcggtggtttatatttataattttagtattttgggaggttaaggtaggtggattataagattaagagattgagattattttggttaatatggtgaagttttatttttattaaaaatataaaaattagttgggtgtggtggtgtatatttgtagttttagttatttaggaggttgaggtaggagaattgttttttttttatatttttttttagtatttttataattttagattttttttttgagatggagtttcgttttgttgttgggttggagtgtagtggtatgattttggttttttgatattggtttgggtaataatttttttggataaatgagattgtattaaatgaaagtttttgaatagtaaaggaaataattaatagataatttacggaaagggataaaatatttgtaaattatatatttgataaggggtgaatatttttataagaaatttaatagtaagagttgttgaaaattaaaaatttgattttttttttttaagttggggttttattttgttgtttaggttggaatatagtgtcgtaataataatttattgtagtttttaatttttaggtttaagtaatttttttattttagttttttaagtagttgggattataggtatattttatcgtgttttgttaatttttaaaatttttttgtagagatagggtttttttatgttgtttagatttattttgaatttttaggtttaagtgatttttttgttttggttttttaaagtgttggaattataaatataagttattgtatttagttaaaaatttgattttataatgggtaaatgatttgaaaaaatattttttaaaagaagatatataaatggttaataggtatatgaaaaataaatgtttaatattgttaattattaaggaaatgaatatttaaattatagtgagatattattttatatttgttaagatggttttgataaaaaaaataaaaataaattaagagattataagtggtggtaaggatgtggagaaaaaggaatttttataaattgttggtaggaatgtaaatttgtatatttattttggaaaatagaatggagtttttttaaaaaattaaaattattatgtgatttagtagttttattattaggtatatttcgaaagaaatgaatttagtatgttgaagagatatttgtatttttaagtttattgtattattatttataatagttaagatatggaaataatttaagtgtttattaatgaataaatagagagattatggaatatatatataatggaatattatttagtttttaaaaagaaggaaattttgttatttgtgataatatggataaaattagaggatattatgttaaatgaaataaattaggtatagaaagataaatattatgattttatttatatgtggaatttaaagagttaaatttagttaggtatggtggtacgtgtttgtagttttaattattcgggaggttgaggtaggaggattttttgaatttaagagtttgaggttgtagtgagttgtgattagatttttggattttaatttagataatagagtgagattttgttttaaaataaatttaaaaaaataaataaataaaataaaattgtagaagtagagaatagaatggtggttgtataggggttagggggcggggggcgggtgtgggtagggattggagagttttagttaaaggatataaaattttagttaggtagaataaatttaggagatttattgtataatatgatgattagagttaataataatgtattgtatatttgaaaattgttggttagttgtagtggtttatgtttgtaaatttagtattttgggaggttgaggtgggtggatcgtttgagattagttcgatattagtttgggtaatatggtgagattttatttttaaaaaaaatagaaaaattagttgggcgtagtggtttatgtttgtaattttagtatttcgggatgtcgattgtttgattgtttgattttaagaatttaagattagtttaggtaatatagtgagattttgtttttataaaaaattgaaaaaattagtaggatgtggtggtacgtgttagtagttttagttatttgggaggttgagaagagaaaattatttgagtttgggaggtttaggttgtagtgagttataattttgttattgtattttagtttgggcgatagagtaagattttgttttaaaaaaaaaataaaaataaaaataattgttaggagagtatattttaaatattacgtttaaaatgatagtatgtgagataatagatatagtaattattttagttattatatatatatatatatatatatatatatatatattatgttgttatattatagatataatttttatttgtcgattataaataaatgtataagtaataaaggaaaatattgatatatatgattacgttaaaatatttttaagtttttataagaaattatataggtcgggcgcgatggtttaagtttgtaattttagtattttgggaggttaaggcgggtggattataaggttaggagattgagattattttggttaatatggtgaaatttcgtttttattaaaaatataaaaaaattagttggacgtggtagtgggtgtttgtagttttagttattcgggaggtttaggtaggagaatggcgtgaatttatgaggcggagtttgtagcgagtcgagattgtgttattgtattttagtttgggcgatagagtaggatttcgttttaaaaaaaaaaaaaaaagaaattacgtaaagtaaaagataagttatagatttagagaatatttataatttatataaataataaaggattatatttaggatttataaagaagttgtagatttatatgaaaaggataacgtaagagaatatgagtaaaagttgtgaataggtgagttataaaagagaaatttaatggttaataaatataagaaaagatgtttaatttaattagtaatgtagaaatgtaaattatagcgcgagttattattttatatttataaaattattaaaattaaaattattttaatattgttgataaaaatgtgggataataggaatgtatatattttgtgttgaagtgtaaatagatataataaatttgaagagaattttggtattagttaatgttgaaaatgaatattttttatgatttagtaattttgtttttagatttattttttagaaaaatatttttatatatgtataaaaaggcgaggataaaaatggttattgtagtattagttaattgttaagaagaagtggaaataagttaattgttgttaagtaaaatggataaataaagtatggtttgtttttataatgggatattatatagtagttaaatgaattatagatatatttagtaatgtaatgagtaagaaatttgtaaaaatggatgttgtatgatattatttgtgtgagttttaaaatatataaaatagtggtatatgtttaggaaagtaaatattttttaaaagtgtaaagtacgtatgggaataatttttaataattttagaatgataattattataaggaaggagagaaatgggatgggcgttaatcgaatttgtaatttattttttttatttttaattttaaagaaaagtgatataaagtaggcgatgtaaaggtgaggatttgtttaattgggttgttgtgattatgaaatgagttaattaatgggatagtgttgaatgaaagttgttgttagtttttttagaagggtataatgatggtggttgtgtaggtggagagatgtgattttttgatttatttttttttttattttgtgttgagttttacgttttttattggacggtataaattggtataaattttttttttttttttttttttgagatagagttttattgttatttaggttggagcgtagtggtatgattttagtttattgtaattttcgttttttagattaaagcgatttttttgttttagttttttgaatagttgggattataggtagtcgttattatgtttagttaatttttgtatttttagtagagacggggttttattatgttggttaggttggttttaaatttttgatttcgtgattcgttcgttttggttttttaaagtgttgggaataggtatgagtgattacgttcggttgatataaattttaatagttatatgttttaatttttttatttataaaatgtgtgtatttaaagtgttatttaatagtattgtcgtgagagtaaataagttgtgtgaagtgttttagaatatttatttggtttagagtaattgttttaggttattgtttttgttgttgatgttgttattatggttgttgttaggtattatttttagttgtatataaatttttttttaattttaatttttaaaaattttataagaattttatttggtaacgaaagtgttttaaaattgagaagatttagattttttttttaatgatttagattaatttgtattttaaatttttgtaagggttaggtaagtaatgtgttaagtgttaagggaaggttataataggttggagggtattttttttttttagaggggtagtagtttttggtttagcgttgtcgtataggaatttagagttggtattgtcgtgataaattgaaaattttaatttttttgtaaaattattttttttattttttttttttttttttggtaggattttacgttgttatttaggttggagtatagtgttatgattttagtttattgtagttttgattttttaggtttaagtgatttttttattttagttttttaaatagttgggattataggtgtgtgttgttatatttggttaattttgtattatatatatatatatataaatatatatatatatatatgtatatatatatgtatatatatgggtttaagtatttttttgttaattttttgtatttttagtagacgtggggtttaattatgttggttaggttggtttcgaatttttgattttaagtgatttattcgttttggttttttaaagtgttgggattataggtatgagttatcgtatttagttaatttttttagtttttgtagagagatggttttattatgttgtttaggttggttttaaatttttgagttcgagtgatttttttattttagttttttaaagtgttggaattttagttatgagatacggtatttggataaaatataaatgataatgaatatatattaatattttaaattaaatatatttagataaagttgattttttgtttgtttttttttgaaattttgggttgggtttagtagtttatatttgaaattttagtgttttgggaggttaaggtgggtagattgtttgagtttagtgttttgagatttttttgggtaatatggtgaaatgttatttttataaaaaatagaaaatttagtcgggtatggtggtatatatatgtggttttagttattttggaggttgaggtagaaggattgtttgagtttgggaggttgaggttgtagtgagttatgattgtgttattgtattttagtttggtgatagagtgagattttgttttaaaaaaatatatatatatttattaatttttattatgtattgttatggtataaatgtttgtgtttttttaaaatttataaattgaaatttaatttttaatgtggtgatattaagagatggggtttttagaaggtgattaggttatgaggggtttgtttttatgaatgggattaatgtcgttataaaagaagtttaggttgggtgcggtggtttatgtttgtaattttagtattttgggaggtttaggcgggttaattatttgaggtcggtagtttaagataagtttggttaatatggagaaattttatttttattaaaaatataaaaattagttagttatggtggtaggtatttgtaattttagttatttaggaggttgaggtaagagaattatttgaattttggaggtagagtttgtagtaaatcgagattacgttattgtattttagtttaggtgatatagcgagattttgttttaaaaaaaagaggtttaaaggagtttgtttgttttttttattcgtgaagatgtagtaagaaggcgttatttatgaagtaaagtgtgtttttattggttattaaatttgttggtattatttgtttggatattttagtttttagaattgtaagtagtgtttattatttataaattgtttagtgtaaggtattttgttatagtagtttgaatggattaagatagatagttttataaaaattaaattatagttggtattttgtatttgtaggtttatatttatggatttaattaattgaagaataaaaatatttttaaaatatatatggttagttcgggcgcggtggtttacgtttgtaattttagtattttgggaggttaaggcgggtggattataaagttaggagattaagattattttggttaacgcggtgaaattttatttttattaaaaatgtaaaaaaattagtcgggtatggtggcgggtatttgtaattttagttatttggaaggttgaggtaggagaatggcgtgaatttgggaggtagagtttgtagtgagttgatattttgttatagtattttagtttgggtgatatagtaagattgttagaaagaaagaaaggaaggaaggaaggaaggaaggaaggaaggaagggaagggaaggaaggaaggaaagaaagaaaaaataatataaataaaaaatatagtataatatatatttatatagtatttatattgcgataggtattatagataatttagggatgatttaaagtatgtggaagaatgtgtataggttatatgtaaatattatgttatgttatataaggggtttgaatattagtgggggttttggaattaatttttggtgaatattgaggatgattgtatttataatttcgtatttaatgtttatttattataatataaagaattaatattatattttataagagttatatttagatttatatgtatttaattttttttttaataggtttttggggaataggtggtgtttagttatatgaataagttatttagtggtgatttttgagattttggtgtttttattataggaggagtgtatattgtaaatgtgtagttttttattttttattattttttttattatatgtatataaatttaatagtaataaggattgtttaatatagtaatatgttttttagttattttttgtaattgttgtaaatgtagtataatatatatttatatttttaaaataaagagaaataagaaaaattatatttaatattattgggaaatgatattttgttatgttatttgagaggtaatatttaataagttggttaaagtgattttatttatatgtttttattgtttaaattttttttatattttaaagtagtatatgttttagaatttaggtagaggtataattttagatttttatagaattggttatagttattttttgtttttaggatatagggtaagagattatagaagttattattttttagggtttgaacggcgttgattataagagtagatgtgtaagattttaggttgtgttgttttagtattgatagtagattagtgatagaggtgtttaggtgttatgtaataaatgtgtgtgataagttgtttgtgataggtgaatttttttaaagtatgtgggttagggtagggtttttgtggtttagatttgaggatgatattgtttttgtgggaagattatgatttttgttttaaatatgttaagttaagttgggtatcgtggtttatgtttgtaattttagtattttgggaagttgaggtaggtggattatttgaggttaggagtttgagattagtttggttaatatggtgaaattttatttttattgaaaatataaaaagtttgtcgggtgtcgtggcggatgtttgtaattttagttatttcggaggttgaggtaggagaattatttgaatttaggaggcggaggttgtagtgagttaaggttttgttattgtattttagtttggttaataagagcgaaattttgttttttaaaaaaaaaaaaaaaaaagttaagttagtaatatttttgggatatttaagtagggatgttaggtaggaaggtggttaaatttggagatttgaggtaagagataaatttgagagtaattagttgatgggaattgaagttataggataggtgtgattttttagaaggaaagggtagtataagaagaggagggtttaggatcgattttttttgatgaattttaatatgattaggtgattttagttaaaggcggagtgagtcggttgaggggtggaagagtagtcgatggagggatgggaggaagttagaagaggttaaattttggaggttaaaaaacgatagtgttttaagaaagaattggttagtaacgttagttattagtggtagtttaagtaagaagaaaacgaaataatggatttaatgatataaagtttattgtaaaaaaatatttgagtagtagtaaggtagagataaatattagtttgaaagggtcgagtagtgagtggaagtgagagaattttgtttagtttttttattatgaaaaattttaaatatatagaaaatttgaaaatataatataatattgtttgtatgtcgattattttatttagatttaataattgttatttatatatatatataaatatttatatattatatatatataaatatatatatatatatatatatatatatatggttttttttttttttttttaagatagggttttattttatcgtatagggtggagtgtagtgatttgattatagtttattttagttttaaatttttgggtttaagcgatttttttattttagttttttaagtaattggggttataggtgtatggtattatgttcggttaatttttaaattttttgtagagataaggtatcgttttgttgtttagttggttttaaattggatttaggtgatttttttgttttggttttttaaagttttgggattatagatatgagttatagtgttaaggtttatatacgtttttgtgggtttgtttttagttttttgttttgagatggaatttcgtttttgttgtttaagttggagtgtaatggcgcgatttcggttgtacgtaattttcgtttattgggtttaagtaatttttttgttttagattttcgagtagttgtgattataggtatgcgttattacgttaagttaattttgtatttttattatagatggggtttttttatgttggttaggttggttttgaattttcgattttaggtgattcgtttgttttagttttttaaagtgttcggattgattacgggtatgagttattgtgtttagtttttttttttttttttaaatatagaaattgttgagtgattattaaaatatttttggattatatgaaaatataggaaagtatgtgttttatatttaagtattttagtatgtattttttaaaaataaggagattttataattataatacgtaattatagttaagaaaataatgattatggttaggtacggtggtttatatttgtaattttagtattttgggaggttgaggtaggaggattataaggttaatagattgagattattttggttaatatggtgaaatttcgtttttattaaaaatataaaaattagtcgggcgtggtggtgtatatttataattttagttatttgggaggttgaggtaggagaattgtttgaatttagtagggataggttgtagtgagttgagattgcgttattgatttttagtttggtgatagagtaagatttagttttaaaaaaaaaaataaaattagaaaataacgattatttttttattttatttgatagtagaatatatttaaatattttttagttagttttaaaatgttttttatatatatatttatatatatatatatttttttttttaatttttttttttttttttttttgtttttttttttttttttttttttttttttttttttttttttttttttttttttttttttttttttttttttgattgggttttattgttatttaggttagagtgtagtagtgtaattatagtttattataatttttattttttaggtttaagtgatttttttattttagttttttaagtagttggaattattatttaggtgtgatttattatatttgattaatttttgtatttttttttttttgtagagatagggtttttttttgttgtttaggtgggttttgaatttttgagtttaagtaatttatttgttttgaatttttgagtttaagtaaagtgttggaattataggcgtgagttattgtatttagtttatgtatatattttaaattaggattaaattaaggtatatgcgttgtatgtattgtgttttttttggaggggtgtggatttggtgatagatggttgagggagtttatttttgatgatttttattttttttgtgatataagagggaggttattaagtgagtatgaggtgagagatagaagagttttagaggtttaaggattagggaggtttaacgtagttattgattagagtgatgtggttgggttattaaataattttgggagtttttttagagtttatgattatgagtgaggagtgggaattattttttgattgtgtgattttttttattattattaatagtttttggttattagagtaaaattttgaagaaaatagattattgggtttatttagggttggggttttgttatttgggtataaaggatgaaaatatagaggggaaggggagttggcgatattgtttagagaggtgttgaaatgaagggttgtggagttgagttgaatagggaggggtttataagttggaagacggaaggtattattgatttaaaggttttaggagattgaaaattggttgcgaggagggtagatagattgatggatagacggttaggaggtgggggttaagagtaggttgtttgattgatttttaaggaggggtttttttaggtgataaggtttagggtatgataatgagaatgtgtggtcgagttggagaggagaagatttttggggattaagtggttaggttattgagaggttaagtagggaatggattttttaggtggataatgaagttttttagagggaggatttaatgtaaagatagacggttagttgggttagcgtttttttgagtgaggtggaggggtttggtagatagtagtagtgagaaaggaagaggaaagtttagtttaattgtagtgtttggaaggtcgcgggttattttaaattagagttgggggttgggggaggagtagttcggaggtagtaatttgaagttaggagagtatttttagttgtaagaaaattaatagtttttattttagaagtttgtaaaggaggtagtgtttttaagggagagttaaattttatttaacgttaggaagtggagggaatgttttaaggagaagttaagggtatgaggggggttatagtttattagagggtataggtaggttagggagggggaaagtggagggttgagttagagttagaaggtatagagtgttatggagatatagtgtaatagagtaggtgggtttgggagtttatgtttttattatgaaatgataaaaataaggataggaggtaggttggattttatttagttagttttttggaagttgtaaaaagtggcgtttaagaatgtagttttggttaggtacgatggtttatgtttgtattttagtattttggaaggttaaggtaggcggatcgtttgaggttaggagtttgagattagtatggttaatatggtgaagtttcgtttttattaaaaatggaaaaaatagttaggagtggtggtaggtgtttgtaattttagttattcgagaggttgaggtaggagaattgtttgaattcgggaggcggaggttttagtgagttaagattacgttattgtattattttagtttgggggatagagtaagattcgttttattaaaaaaaaaaaaaaaaaaagaatgtagttttaggcggggtgtaatagtttacgtttttaattttagtattttgggaggttaggagtataagattagtttagtaaatatggtgaaattttatttttattaaaaaaaatataaatattagttaggtgtggtggtatgtatttgtaattttagttatttgggaagtttaggtaggaggatgatttgagtttagaaggtggaggttgtagtgagttaagatggtgttattatattttagtttgagtaataaagttagattttgttttaaaaaaaaaaaaaaaaaagaaaagaaaagaaagaaaaggaaggaaggaaggaaggagagagagagaaagaaagaaaagataaagaaataaagaaagaaaggtaggtaagaaagtggtttttaaagtagaattggttgtattttaattttagttttgttatgtattaattgttttgtttataattttggtaaggtttttgggtattaattttttttttgtaaaatggggataatattagtatttattttatagggttgttgtgataatttaaagatgtaatgtgttaaatgttgatatggtttggatttgtgtttttattaaattttatgtagttttagtgttggaggtggagtttggtgagaggtggttggattatgggagtggatttttacgaatggtttagtattatttttttggtgttgtttttatgatagagagttttggtaagttttggttgtttaaaagtgtgtcgtattttttttttttttttcggtttttgttatgtgagaaggttcgttttttttttgttttttgttataattgtaagtttttggagatttttttagaaggtaagtagatgttagtattatgttttttgtagagtttatagaattatgagttaattaaatttttttttttttttgagatagggttttgttttgtcgtttaggtagtggcgtaattatagtttattgtagtttttattttttggtttgaagtaatttttttattttagttttttaagtagttagaattataagtatatgttattatatttagttaagttttgaattttttatagagacgggtttttgttatgttgtttaggttggttttaaatttttgagtttaagtgattaatttttcggttttagttttttaaagtgttgttaggattataagtatgagttattgtgtttagtaaatattttttttttttttttttttcgagacggagttttgttttgttatttaggttggagtgtagtggtatgattttggtttattgtaatttttgttttttcggattaagtgatttttttgttttagttttttaagtagttgggattataggtgttggttattatgttcggttaatttttgtatttttagtagaaacggggttttattatattggttaggttggttttaaatttttgattttaagtgatttatttgttttagttatttaaagtgttgggattataggtatgagttatcgcgttcggtaattttttttttttataagttatttagttttaggtatttttttatagtagtgcgagaagggattaatgtaaatgtttataatagtgcgtaaatatttataatagtgtttgggttgttattttagatatatttggtggagttttgtaggtttagtagagtagtttttttgattatttgaattttgtttttggttaggtaggaaatatgaagtggatgataatgatgatttgatgagtagttgtgaatgtataaattatatggagatattaaggattgtaatagataagaagattttagtgataaacgggttatttagggtagtagttaattgatttttataatgagtgggatttggataagaaggcgtggttttttaaggttattgaaggttttattgttatatatttagttaagtgtggtttttttaatggtggggtatttagtttttttgtaaatgtataaaatgttaatgttaggaatgtagaatttttgtaaagaaaattttttaaatttattgattttaaaaataggggagataaaagaaaaatggaatgaggataattttatgttgaagaagatagaaatataaatgtttatatatttggtttgtttttaggagaaatttttagaagattttaaagttaagttttatgaagatgattaaagaaattttaaaggagatgcgttttgttgttatttgaagagggaatttgtgggttttttattaaagtttttggatgaaaatgaaattagaggttgtaggttaggtgtagtggtttacgtttgtaatttaagtattttgggaagttgaggtaggtggattatttgaggttaggagttcgagattagtttggttaatatggtaaaatatcgtttttattaaaaatataaatattagtcgggtatggtggtgtatatttgtagttttagttatttaggaggttgaggtagtagaatcgtttgaattttggaggtagaggttgtagtgagtcgagattatgttattgtattttagtttgggtaataagagtgaaattttattttaaaaaaaaaaaaaaagaggttataagaagaagttgttattataataaaagttgttggtttggggatttgtaagggagttgggttatttagaaggtattataagtaagttgttataattaaatatatgttttattttatggatatttttggttgttttgtttgttttttgagataaggttttattattgtttaggttggagtatagtggcgtgattatagtttattgtgtagttttaattttttgggtttaaggaatttttttattttagttttttaagtagttgggattataggtgtatattattatttttggttaatttttttaaaaaaatttttgtaggtcgggtatggtggtttatatttgtaattttagtattttgggaggttgaggcgggtagattacgaggttaggagttcgagattagtttggttaacgtggtaaaattttgtttttattaaaaatataaaaattagttgggtatggtggtggatgtttgtaattttagttattcgggagttgaggtagagagtcgtttgaattttggaggcggaggttgtagcgagtcgagattgtattattgtattttagtttgggcgatagagtgagatttcgttttaaaaaaaaaaatttttttttgtagagaaggtgttttattatgttttttaggttggttttgaatttttgggtttaagagatttgttttttggttttttaaggtgttgtagttataggtatgggttattgtattcggtttattttgtggattttaaggatgatgagttggtgttaaatgagtttagagaatttttagtgtttaatattgagattaatgaggaatgttttgtttgatagatttatggatggtgtggattttgtgttttggaggaatgtagaggaaacggattattatatttaagttttttttggaaggtggtttgttgatttagatatggaataaggttatagattattaggtttaggggattttaggaaaaaggaggaaaatttaaggggatgggaggttttttttagtgtttgtgaggttaatagatatttttaatttttaatgtgtgtatgttttagaaagggtaagatgttggttgtttttttattttttattagttgaaatgtggtttttttttattatcgttattttgattattttttttaagttatagatattttttagatgttaaatttaaaaggcgtggttgaatttatttgtattaatttaggtaatgaatttgggaggagagttcgtttgttagaacgtaagaacgttatattttgtagttggtaatgtggagtttagggatttttggaattatttttttagttgatcgttagtatatttttttttatttatttaattatattttagtttaggtgtagttgggaagggatttcgcggatgtaattaaagttataaattggtttattttgaggtaatttaaagggagattgtgtaggagaggtttgatttaattatatttaaagtttttagtggtggttggagaggagaaaatatatttttgtatttaggaatttttttttttattttaattttagtagtttagatgaggtgttagttttttgtaggttttggatgagttcgtggggttatagaaaaaagaattgtagaaaatttaggaataaaaatggagatagtgatatttttaagtaaaattattagaagtttttagaaagtaaggtaagaaaaggaaatttgaggattagagaagttgttaggttagtttattaagttttggtttgattaggaaatttagtgtttttttgaaggatggaaaatttggagatgaagaatgggaattatgtattgttaaacgtagttgttaaggggtttaagtttaggggtgtgaagaagagttgagatttgtttatagatgttaagattgtagggtttattttggattattaatgagattatttagaggttaaggagtttatagggtttatttttggggatattggtttagtagtgttgtagattttattttgagtagagtgatatgagaattgggttgggggagttgaggagaaaaggaagttttaaaggttttgtgtgtttgtgtgtgtgtgtgtgtgtgtgtgtgtgtgtgtgtttgtgtgtgtgtgtgtaaattggaaatggttaaatttttttgtgtgtagtggtatattaagtagggtggagtggggggaggaggttatattgtaaggggtattttgttattaatatttttttataattgttggtgcgtagtattaataaaaagttggttttaggttgggcgtagtggtttatatttgtaattttagtattttgggagggtgaggtgggtagattatttgaggttaggagtttaagattagtttggttaacgtggtaaaatttcgtttttattaaaaatataaaaattagtttggcgtggtggtgtgtgtttgtaatgttagttatttgggaggttgaggtaggagaattattggaattcgggaggtagaggttgtagtgagttaagatggtgttattgtattttagtttgggttaaagagttagattttattttaaaaaaaaaaaaaaaaaaaaagttggttttagaattatttttaaattttttatagataatatatttttttattatttgtatttggaataattatttttattttttgtttatggtaagttgtagtttgtgtgttttatgtgggtaaatagtttagttttattagattgtaaatggggttggggggtcggggtagagggtatggcgagtaaggattatttttcgtataataatagttttatgtagtatggttttgtataagagaagtgttttttaaatatttggtaaataaatgaataattgaatttgagtaataatgaagaaaatataagtaggaattttataagaagatttttagtttaaataagaagaaagtaagttaggtacggtggtttatgtttgtaattttagtattttgggaggttgaggtgggtggattatttgatgttaggagtttaagattagtttggttaatatggtgaaattttatttttattaaatatataaaaaaatagttgggtatggtggtggatgtttgtaattttatttatttgggaggttgaggtaggagaattatttgaattcgggaggtagaggttgtagtgagttaagattgtgttattgtattttagtttgggtgatagggtaagatttcgttttaaaaaaaaaaaaaaaaaaagaagaagaagaaggtatttttaattattttggttgtaagataatataaaataggaaatgatagtattattagagatttaaggttttttaattttttacgtttaggataggttttggaagtttggtgaagtttgtggagtgttagaataatttttaattgtataaagtaaaataaatgggattataaaggaaaataattatattgaagtatagttgttaaaatgaaataaaatgtgtaagaagaagatttagtggtgagtttaattattattattaattataaagtaatcgtgagtatatatgatattttgaaatttttgtaattattggaagatgatataaatgtgtaaattttattaataatagttatatgtattataaatatcggtgtaggtttattgtttatatttattattggagaaaatgttaaattttagttagagattagtgaaaatgaaatgtaatttttttttatttttgtttgttttttgggattttggatgaagagttttgtattatattgggtatagtggtttatgtttgtaattttagttattaaggaggttgaggtaggaggatcgttggagtttaggaagttgaggttatagtgagtcgtgatcgtgttatttattgtattttagtttcggtaatagagcgaaatttagaaagaagaaagaaaagaaaagagagagagaaggaaggaaggagaaagaaagagaagaaagaagaaaggagggagggagggaaggagggaggaaggaaggaaggaaagaaggaaagaaggaaggaaggaaagaaggaaagaaggaaagaaaagaatgaaaggttaggtacggtagtttatttttgtaattttagtattttgggaggttaaggtaggtggattatttgaggttgggagtttgagacgagtttgattaataaggagaaattttatttttattaaaaatataaaattagttgggtatggtggtatatgtttgtaattttagttattcgggaggttgaggtacgagaattgtttggtttagggaggtggtagttgtggtgagttgagatcgtgtcgttgtattttagtttgggtaataagagtgaaatttcgttttaaaaaaaaaaagaaagaaagaaaagaaaagaaaagaaagaaagaaagaaagaaagaaagaaagaaagaaagaaagaaagaaagaaagaaagaagaaagaaagaaagaaagaaagaaagaaggaaaatagttttgtatgagagttagtgatgttttagagtgggaaggaagttaggttaatatgttgtttttattaataagtttttaggttgataggaggtgttttttttagttttatatttagagttaatttttttaggaggtttttttttattttaagttttgttttagggattagggagtggtaattttttatatgtttgtatgtttttatttgaattaatgttgaaggtttttttattatttaaagtttttaaggatgtaatatttggagaaaatatgttaaaaagatttggtatttagagataattttttttaaatgtttgaatgggagtattaaatgagtttttagttttgaaggttgggttggtttggggaggaaaattaattgtttttttagtttagttatattattagttttaaggtagacgtttagaagatttttttttagtttatagggaaaatgatatttaattttatgagagttttaaaggtagaggatatgggatgtggtattaggaatttggaagatatgtttttgtaatggggtatatagtatttaagtgagggaaattattaggaagtggtattggttttggaattttttttatgttatatagggatagagaggaaattaatattttttaaggatttattttatattaggggttgtatattttgtgttttatatttattataaattgtttttttataaggtaggtgatttgtttttttttttttttttttttttttttttttttttttttttgagatagggtttttttttgttatttgggttggagtttagtggtgttatttcggtttattgtaatttttgtttttttaagtaatttttttgttttttagttttcggagtagttgggattattggtatgtattattatatttagttaatttttgtatttttggtagagatagagtttcgttatgttgtttaggttagtttcgaatttttgtgtttaagtgatttgtttattttagttttttaaagtgttaggattataggcgtggattattatgttttgtttgttttgtgatttgttcgtttcggttttttaaagtgttgggattataggtatgagttattacgtttggttagtgtttgtatgtgtgtatgtgtgtgtgtatgtatgtatatatatatatatatatatatatatatatatatatatatatatatatatatttttttttttttttttttttttttttttgagatagaattttgtttttttgtttagattggagtgaaatggtgtgattttggtttattgttaatttttgttttttgagtttaagtaatttttttgttttagttttttaagtagttgggattataggtatttgttattatgtttggttaatttttgtatttttagtagggatagggttttgttatgttggttaggttggttttaaatttttgattttaggtgatttatttgttttagttttttaagtagttgggattataggcgtttgttattatgtttggttaatttttttatttttagtagagatacggttttgttatgttggttaggttggttttaaatttttgattttaggtgatttatttgttttagttttttaaagtgttaggattataggcgtgagttatcgtatttagtttttttatatatatatatatatatatatatttttttttttgagatagagtttcgtttttgttgtttaggttggagtgtaatggcgtaattttggtttattataattttttttgggttagggtaatttttttgttttagtttttcgagtagttgagattataggtatgtgttattatgtttagttgattttttatatttttagtagagatggggtttttttatgttggttaggttggttttgaattttaaaatcgtaggtgattcgtttattttagttttttaaagtgttgggattataggcgtgagttatcgcgtagggtttttttttatatatttttaattaaattaataaaatagttggggtagtggtttatgtttgtaattttaatattttgggaggtcgaggtaggagattatttgagtttaggagtttaagattagtttgggtaatatggtgaaatttcgtttattaaaaaatataaaaattagttaggtgtggtggtatatgattgtagttttagttattttagaggttgaggtgggaggattgtttaaatttatgaggtcgaggttgtagtaaattgtgattatgttattgtattttagtttgggtaattgagtaagattttgttttaaaaaattaaaaattaggtaggcgtggtggtttatgtttgtaattttagtattttgggaggtcgaggtaggtagattatatgaggttaggagtttgagattagtttagttaatatggtaaatatgtattttagtgtttattgaaaatataaaaattagttggatgtggtggtgcgtgttagtaattttagttatttagtaggttaagttaggggaatcgtttgaattcgggaggtagaggttgtagtgagtcgagatggtgtttttgtattttagtttgggtaatagagcgagattttgttttaaaaatataaataaataaagaaaattttaaaaaattgaaaagtaaataaataaataaaataaaataaaatgtggaagtaatagtaaaggtttgattttgttttaaaattataggttttttttaagttgtgtttttataaatttttaaatgagatgaagataaatttttgttgagaggggtatggttatgatttatagtttgggtaggataaagtattttttattatatatatatatatatatatatatatatatatatatatatttatttttatatatacggtgttatttttattaagttgtatttgatttttttttagtggttttgtttggagtttatttaatgttattagtttgttaatgaatagattaagataataagtaattttgtttttatttttttattttaaaaaattgtttgttagttttatgagaaaataaagtgaagaataaaggtaattattgtatgtattatagtagcgagagaaaaaagagtgttaattaatttaattgatagttagaggattgtatggttattagtgatggagtcgggatttgggtacgtgtatatttgttggattttgtagtttggtatttatattttatttgtttggtggtaagattttatttttgcgttggggttattattttttaatattgggtagtttatggtattattttttaagggattttttttttttttagatgagtgtgagtatttgatttattttaagtttattggagttttttttttttgatttaaagtagaagtattgattattggtgtttgttgtttggatgttggaattattttggtttttgttttttttaaagatcgtttgtttagttttttttttagttttgtaaatatttttttaataatttattattatttattaatttgttgtttttttataatcggttgtttttttagttttatgatttttagtttggagttatagaataaaagttgaatgtgggtatagaaggtttagttattgagtgtttatatggttttgaatttattatttgaaatttaagtttattatttgaaataggaagaatatttttttataaggttggtatgtgaatttaattagatgaaatatgtgtttttcgagattaaggattttgatttagtttttgttgaattcgtagtgtttattatagaatatagagaagagttttaataaatgtgttggtttaatgataattgtttttgaaaatattttgttaacgttagtacgtaatatgaatagttgtgtttattatgtttagggtgaagttagttaatttcgatttttttttttttaaagttttgttttgttttttttttttttttttgaatttttatattaaatttattttgttttttaattttttaaaaagagatagggttttattttgttatttaggttggagtgtagtagtgtaattatagtttattgtaatttttaatttttgtttttaagtaatttttttgttttagttttataattagttgggattataggtatgggttattatgtttggttttttgtttttttttttttttttttttggtagagatgggtttttttatgttgtttaggttagttttaaatttttgtgtttaagattttttggtttttgttttttaaaaggattataggtatgagttattattttgggtttttgattattttattttaaagtttagttaatttatatttttttattattattattattattatttttgagatagagttttattgttatttaggttggagtgtagtggttatttcggtttattataattttcgttttttaggtttaagcgatttttttgatttagttattttagtagttgggattataggtaggtattattacgttaggttaatttttgtatttttagtagagatgggttttcgttatattggttaggttggtttagaatttttggttttaagggattttttcgtttcggttttttaaagttttgggattttaggtgttagttatttcgttaggttgtttgatattttaaaattagaaaagttatttattttaagtggagggtgggtgggtttatatttataggaatggaagaaaggaggatgtttttttttttttgtttacgtttagtagttttgaaattaatgttaaggcgagtaaacgttcgttttttattttttgtcgttttcgttttatgtcgagattttgttgttgaatacgaagtaaacgttttttagaaagtttagtttaagaaataatttagggcgaggtgagggtataaaggtagagaaataaggggaaatgatatttttttaaagaatagagatttttgaatagtatcgggggtcgttatagtttatgaggatattttcgagtttttttatatgatattagggattttcgtgttatatatagatattgtttttagagattaggagggggaaagaggatattgttatagttttgtttttcgaaatgattttagatgtttttgagtttgtgaggtttttgtgttcgttattagtaaaataagtgagggagaagtttgaggagtgatgattttagtagttatgggtttaagtttgggaattttaagttatagagtagaggatttgggggttgaagaaaaagatttttcgtagttttagcgcgaagagggcggcggggatcggggtggtgggggtggaatttcgtcgtttttcgaagtaggagtaagttgtagaggttgcgcgggggtttgagcggagcgagaatagtttttttttttgattatgttgtttttcggaggttagtttaggtatcgtcgtttttttttacgttgttttgtttttttatcgtttgttttggattattttgtttagagagatcgttgggttagagggtttttgtggatttttggggcgagtttaatgttttcgaaaattgcgtgttttagtattatttgaatgtttatcgggtttcggaattacgagtttttagagttgttttttcgttttacggtttatattttaggtttgttttttagtgatttttgtaataatacgcgtttttcgattagttttgaggatttgggttttgcgacggataggggaaggaaagaaggaaggttgtgaagaatcgtggtgtttgtttgtatagtttttttcgcgtgcgagtattagttggttaaagtcgtttgtttcgatagttttttttgcggggtatttggggattttttttttgggaatttacgttttttgttagagtagttaatgttttttttgtttaaaattttatatttttggtttttttttcgttttcgcgttgaggttggagttaggttaaatgttagaatatttggatgttttaagagtgatatttgggagtgggtgggtaagaaattagtagcgggaagggaaagtggaggagtagaggattttcggggtcggcgtttggggtgagttcgcggttttttagagtttggtatatcgtcgtttggtattcggtaggcgtgagggaacgtatagcgtagcgagttaggcggggtaaattcggagtaacgcggaggcggtgatttgggtaagggcgaggttagttaaggacgtagttttggtttcgtttttaaggtacgtttggttaattaggaatcgttgatttattaagtttttttttttgcgttcgtttttttttgtatttcggttttaggcgtaaatacgtttaaagtcgttaggttaaagcgttgagatacggttttttaagttaattagagagcggttttcggatatggggcggaattttgaaaaggcgagagttgagatgtcgtttcgttttgttttattacgtcgttttttagcgttcgttaattaggagagttcggagtcggatttatttttagttttaggaagtagtagttttcgtttcgcggcgggtgtgttcggtagttatagatttatttaggatatttttcgttgtcgacgggttagatttgtattcgaagggtttaagcggggaggaatcgttttttattattttttagggatttggggagggaatgtttaggtcgtaggggtggaggatataggaaacgtaatatttttttttaattgcgtttttttttttaggttttaaaggggttttcgtgtttttttagtttagagtttaagtttaaacgaggcgtataggcgaggatagtaggaaggttttaagttaaataaacggatggtacgaatttcgtttggtttagttttgttttaacggtgtgggtgtgggttgggtgttgtagttttcgagtaaggggttgttatagttataattagaggagttatggagttgttacggaggagggattttagagttagtttgggtttgttttaagggagtttttgggatagtgtttggggttgcgcggtttggtttttattttttgtagtatttgttattttagttaggggttatttttttttaatggtttgggagtagttagaggttagaggttatatttattagaagggatgtaagtttaggaagtagttagaaaggaaaggttattttagagatggggttatttgaaaaatttttaggaggaaggagaaaggaaatgggataagtgttatgttatattaaatatttattttttgtagattgatttcggagtaatttttgagttaggaggggagaggttagtgtttaaattgttgagattttaggttaaaaagttatagaaaagaaattattttgaaaaatataatgatttagaggtagttattttttgttagtaattttaagagttgaggaggttttatgttttaggatatggtgattagttgagtgaattagagattgaggtagtggtttttataggggaagaaataagttttgggtgtatgggagtaggaaaggagggtgatagattggagaaatgataaaggttattttggaagtttatagggaagtggttttgggaaatttgaagatattgggatatttagaaggttaaggggatttagtttattttgttgggtaaggtgttgggagtgaaggtaggtaagttatgttaagggtttgggaagtaaggggaaaattggaaggggtattttaggtgaagaagggtatggaatggggtgtagaagtttatggagatgatcggtagattttagggcggtttttggtatattagaagttgggtttatgttttttgagttttattataaggtggtgaatgttgatgagtttagttcgggtagggagggttcggagttgcggttgggatagtattcggtggaagcgatgatagagttggattagttgggttagcgttttttggttaaagaaagttattgagggattaaatcgtaaaatggtgttaatagtgatgattaagaattaggttaggcggttaggcgtagtggtttatatttgtaattttagtattgtgggaggttatggcgggtagattacgaggttaggaattcgagattagtttggttaatatagtgaaattttatttttattataaatacgaaaattagttggttgtggtggtaggtatttgtaattttagttatttgggaggttgaggtaggaaaattatttgaatttgggaggtagaggttgtagtgagtcgagattgtgttattgtattttagtttggataatagagttagattttgttttaaaaaaaaaataaaataaataaaaaaaaaagaattaggttagggtttatatagaattttgggtatagttagtaattgaagattaagggttatttagatgatgttgagtttagtaaaaagatggggaaaataattaatgatgggggatttgagtggggtttgggatttgtaggttatttgaatgatattggtgttatttttgaagttggtgaaatttcgtattatattttgatttagagattttattgatgatttttaggaattattaaagttacggattagttgagttattcgggttaatagtaggaggaaatagtgttagagagggatttggttgatttttaattttattaagttttttttaaggtatagttatttttattattaaatttttttttttggtatttttttaatttagttttttatattttatttttttattatgtaatttgtatttttttattttttttttttattttttttattattgattttattattattatattttttttatattttttttttttcgaagtcgtttagtttgtttacgtttaattaaagttttagttttttttataaatgttattaaatttttaaaagggggagatagtaattttttaatgaatttttggaaagatataaatatatatatataggtgttttggtgttagtagatttgtttaattttggtattatgattaatgtagatttatttgaatggtattttttagttgttgtaaaagttaaggaaaattttttatggagaaaaatatttttaattttaattttggtttatatagtttttttggttaagattaaataatgaatttaaagattattagatataaaagaagggtagttattaagagagttagtagatataataagtaatagttgttgattttaagaattattcgatacggatagtagttgtattgtgtgtaatgtttaaagttaaggataggtcgggtatagtggtttacgtttgtaattttagtattttgggaggttgaggtgggtagattatttgaggttaggagtttaagattagtttggttaatatgatgaaattttatttttattaaaaatataaaaattagttgggtatgatggtggatgtttataattttagttattcgggagattgaggtaagagaattatttgaatttgggaggcggaggttgtagtgagtagagattatgttattgtattttagtttggatgatagagtaagatttcgttttaaaaaaaaaaaaaaaaaaaaaggatgtaaaaatgattaattagtaagaattatgaggaatgaatagatttgaaaaaaggaaatttttttagatatgaaaagttagttttagaaagttaatagattaataagaattatataatgaattagaatttataattgaagaaaggatttagaatgtagtatagatagaagatggaaaattttgagatagtaggagatatagaaatttaattaatgtatttaggtattgaaattgatggttattaatattataaagagagttaagaagatattatgtgttttttgatggaaatatatattattattttttaaatatttttgtagaaaaaaaaaaattaatttaaatttgattaagtttttttatttaattatatatttatgagaaatatattagatagaggaagtttggttatattatggaatgtagttagtaaaatttaaattgtatattattttagatgataaatgatttaataatttagttttttttaaaaataaattgtagaggagatggaagggaaatttatagattaaaaaaagatatatatatggattttatatggattttgatttgaattataaaaattatttatgaaggttaggtatagtggtttatgtttgtaattttagtattttgggaggttgaggcgggtagattatttgaggttaggagtttgagattagtttggttaatatggtgaaattttgtttttattaaaaatataaaaattagttgggcgtggtggtgggtgtttataattttagttatttaggagattgaggtaggagaattgtttgaattcgggaggtagatgttggagtgtgttaagatcgggttattgtattttagtttggaggtaataagagtgaaattgtgttttaaaaaaaaaaaaaaaaaaattatttatgaaataattgggaaaatttgaatagttattttagataagataatttttttaagtgtgataatgtattgtagtttttaaaattatttgttattaggtgtggtggtatatatttgtagttttagttatttaggaggttgaggtgggaggattatttgagtttaggagttcgaggttgtagggagttatattatgttattatattttagtttgggtattatagtaaggttttattttaaaaataatttttttaataaaaataatattttgatatagatgaagtgataatatttatttgtatatgtataagatttaatttaaagtaattgggggatatagaaggaggataagtaataggtgttggtatagatgaaataaaattgttcgtgaattgttatatatcgaatattattgatgatgtttgggggtttattatgtttttttaatagtatagtgaaattttttataataaaatgttaatttttgtttaatgtaaaagggagatttaaataaaaaaatttataaaagtaaataatttagatagaaagatttggtaagaagaaagtgaaattattattttatttaaaaataaattattaatattaaaattagttaggtgtggtggtgtatgtttgtaattttagttatttagggagattgaagtagaagaattatttgaatcgggaggtagaggttgtagtgagttaagattatgttattgtattttagtttgggcgatagagtagtaatttgttttagtaaataaataaataaataaataaataaaaattgtattttttttattttttttttaaaatatttatttatatttattgagggtgttaaataattaatatgttgtaaggaaggatttttttataattaaggtatttttgtgatgtgattttggatagagattaaataattaaatttaatttattatagttgtttaaatgtagttttatatatatatatataaataataatgtagtagtgtacggtggggtatagggagtagatttgttaaagaaaagttgaattaatagtgatgatttttgttaggtaggagttataaattatataatgtgttgtaagtatgatatatatatttgattttgaagattttattttagaataaattttaagtatattttttttttttttttttttttcggaaatagggttttgttttattatttacgttggagtgtagtggtataattatagtttattataattttaatttttttggtttagtgattattttattttagttttttgagtagttgggattaataggtatgtgttaatatgttttatttattttttttttattttttgtagagatggggttttattatgttgtttaggttggttttaaatttttgggtttaagcgattttttttgttttggtttgtgttgggattataggtgtgagttatcgtgttggttttagtattattttttattgattatatgttgaaataataatattttggatgtagtggtttaaaaaattattttatttgtttttttttattttttaatgtagtttttagaaaatttaaaattatttaagtggtttatatttgtggtatgtattatatttttataggagtattggtttggatttagatgaattttaagttttttataacgtaaaagagaatattttgatagtagaggagtgattagaggaaatagtgtattgggttttaataattttttttacgtagtatgaagtagtagttgattaaaaaggattagaagtattgatggtagttggcgagtttttatatttggtaaatttagtgataaattttagttgtttttagtagaaataattggtttaagtgtatttttgtgggtgttttaattttttgtaatgatttcgttttagttttttaagtagttagaattataaatgtatgttattacgtttggtttttttttttttttttttttttttttaaagaaatggggttttagtcgggtatggtggttaatatttgtaattttagtattttgggaggttaaggcgggtagatgacgaggttagattaagattattttggttaatatggtgaaatttttcgtttttattaaaaatataaaatataaaaaaaatatcgggtatggtgttgggtatttgtagttttagttattcgggaggttgaggtaggaagaatggtatgaattcgggaggcggagtttgtagtgagttgagattgtattattgtattattttagtttgggagatagagggagattttgtttaaaaaaaaaaaaaaaaaaaagaaatggagttttattatgttgtttaggtagatttttttaaatttttaaatttttgggtttaagagatttttttattttagtattttaaagtgttgggattataggtatgagttatagtattagtaataatttttttaaaattaggaatatgaaaagggtttttattattatttttttgtttaatttttaaatattattttgggagtgttagttagtagaataagaaattaaaaatataagatgttaaagataaaaaattagaaaagatttatttatttttagtagaattaaatatacgtattatatttatttaaaaatatggtaaacgatttatagtgtttttgtgttgaaaatttaaaaaggttattaaaagatattaaaagatttttttaaaaattggaggaggaggttaggtggagtggtttatatttgtaattttagtttagtgagatattataaaaaattaaatttttaaattttgtattttttatagaaaaaaaaaagttaagtgtggtgttgtgtgtttttagttttagttattcgggaggttgagataagagaagtatttgaatttaggaatttaaggttgtagtgagttatgattgtgttattgtattttaatttgagtgatagagtaaaatttgttttaaaaaaaaaaaaaaaaaaaaaaaaaaaaaaaaaaaaaaaaggatagggagtttatgattatgattatggataggaagttttaatattataaagtattaatttttttaaattagtttatagataatgtaattttaattaaaatttttaaagattttttaaaatgtgaaaatttttcgagattagtttagttaatacggtgaaattttatttttattaaaaatataaaaattagttgggtgtggtggtatatgtttgtaattttagttatttaggaggttgaggtaggagaattatttgaatttaggaggtagaggttgtagtgcgttgagattgtggttttgtattttagtttgggtgataagagtgagattttgtttaaaaaaaaaaaaaaagaaaagaaaaaaaaagaaaagaaaaagattttttataaatggttttgggttaattatttatataaaaaaaagaaatagatttttattttatattatatataaaaattaattttaagtaaatttgagatttaaaggtaataaaaaaattttttttatatatttgtttattttttaattttattattattttttgagatagggttttattttgttgtttaggttggagtgtagtagtataaatagggtttattgtagtttcgattttttaggtttaagtgatttttttattttagttatttgagtagtagagattataggtgtgtgttattatgtttggttaatatatttttttaattttttgtagagatgaggttttattatattgtttaggttggttttaaatttttggttttaagtaatttttttgttttggttttttaaagtgttgggattataggttttagttattgtatttggttaaaattttataatattaagaagaaaatgtagtataatatttttttggttttggagtaataaggaattttattttttttttttttaaacggagttttattttattattagtttggagtgtagtggtacgattttggtttattgtattttttatttttttggtttaagtgatttttttgttttagttttatgagtagttaggattataggtacgtattattacgtttagttaatttttttgtatttttagtagagacgaggttttattatgttggttaggatggtttcgatttcgtgatttcgtaatttattcgttttagttttttaaagtattgggattataggcgtgagttattatatttagtttaggaattttttaaataggataaaaatagttaggcgtggtagatggtggttgtaagtttagtattttgggaggttgatgcgggaggattatttgaggttaggagtttgagattagtttgggtaatatagtgagattttgtttttataaaataataataataataaaaattagttgggtatatggtatatatttgtagttttagttatttgggaggttgagggaggagggttgtttgagtttaggaggttgaggttatagtgagttatgattatattattgtattttagtttgggtgatagagtaagattgttattaaaaataaagatataaaaatgaaggatagataaatttaattatattaaaattataaatttttttaattaaaaagtaatattaaaaaaataaaggttggacgcggtggtttatgtttgtaattttagtattttgggaggttgaggcggatggattatttgaggttaggcgtttaagattggtttggttaatatggtaaaatttatttttattaaatatataaaaattagtcgggcgtggtagtatacgtttgtaattttagttatttaggaggttgagaaaggataagtgtttgaattcgggaggtagaggtgtagtgagttgagattatattattgtattttagtttcggtaatatgagtgaaattttattttaaaaaaaaaaaaaaaaaggtgtaaggattttttgagtttaggagtttgggtaatatagaaagatttttattttattaaaaaaaaaaaaaaaagtaaaaagatatatattaaaagataatttgtaatttacgtataattaataagattagtatgtagatgatgtaaagaatttttataaataaaaaatattagtagatttatttttttttttattttttgagagagttacgttttgtaattgaggttggagtgtagtggtataattttggtttattgtaattttcgttttttaggtttagcgtttttgaggagttgggattataggtatgcgttattatgtttggttaatttttgtatttttagtagagatagggttttgttatgttggttaggttggttttgaattattggttttaattgatttattcgttttagttttttaaagtgttgggattataggtgtatattttgtttagttataagtcgatttttaaaaggttaaatgttatgatagttattttataggaaaaaaaaaaattgtatagttgtggtgacgttttttatatagagtattagttttagggagtttgttttttgtagatttttgattcggtaacggatgaatgaggtatattgatatatagatattttgttttgttagtttagttgagtgtgtttaggttgtttatagattttttgaagagtattgtaaatagttgtaatggcggttttgattagttagtgagattcgtatttatttagtaaagattaattgataaagatttgagttaatattattacggggtaattgatattgtggattttttgagtagaaagtagttaagtatttgcggtatattaaagattagttttaagattatatgagtaaataagttatttagataatttttttatatttttttgttattattttaatttatttaattaaaggtaaagattaggtcgtttttaattatatttattattgaagttatgtaaatttttaggttttttaagagggtttgtggttattattattaatattttttttattagtttgattgaatttttatatatagttattaaatatttgaaatgatgtttaatgttattagtaattagaaaattataaataaaatttattgaaatataggttgagtatttttaatttaataatttgaaatttaaaatgttttaaaattcggaagtttttgagtattaatatgatgtttaaaggtaatgttttttggagtattttagattttagatttttagattatagatgttaattagtaaaaataatgtaaggaatttaaaattcgaaaaaaattaaaatttgaaatatttttgatttcgagtatttttagtagtatttttggtttttaaaaaaaaaaagaaaaaaaatggtaaagatttgataatattatatgttggagaaaatgtggtttagtaggaatttttatatattgttggtgagaaggaattatttaggaaaataatttattattgttttataaagattaatattgtatattttattagtagtaagattattgttttaggtttatatttaagagaaatttttgatgaagataattaatatttatgtgtgttaaaagatatgattatttataaaataatgtttatagaagtaagaaattggaaataatttatttatagaatatgtttaattatataagttatatatggtagtgaaaaggaatgagttatagttatatgtaataatatgataatattagaaaaattatgtatgaaaaaaattttgtgattttggggttttttgttttgttttgttgtttgagatagggttttgttgtgttgttaagggtagattataatgttatgattatggttcgttgtaatttcgaatttttggattttaaagtggttttttcgtttttgttttttaaatagttagaattataggtgtatattattatgtttggttttttttttttttttttttgttttgttgtttttttgttttgttttattagtgtttatattattaaaaaataaaataatttagtgtagtggttgttttgttttttaatgatataaatatttataaatatattatataatttaagtagtagtagtttggtaaaagttattattaaattatgaaattttattgaaattatttttgtgtttttcgtgtataggtattcgttgatttaaatgttgtatttattgtgtttttgtttttttttttttttttttgtgtgtgtttttgtttttaaaagtaaagttatatatatgttaaaataaaaattcgttgttttttagtgttattaaaaatagaatttaggtcgggtgtagtgatttatgtttataattttagtattttgggaggttgaggcgggtgaattatttgaggttaggagttttaagattagttgggttaatatggtgaaattttatttttattaaaaatataaaaattagttggatatggtggtacgtgtttgtagttttagttatttagaggttgaggtaggagaattatttaatttgggaggcggacgttgtagtgagttgatatcgtatcgttgtattttagtgtgggagttagagtgagatttcgtttttaaaaaaaaaaaagaattataagattttttatttgagggtagtaatttaagattagtttaggtaatagttgttttttgtaaagataattgtttttataaaattaaaaaattagttggtatatatttatagtaaatttatttttggtaaaagtgttaagaatatatattggggaaaagatagttttttggttaggtacggtagtttacgtttgtaattttagtatttgggaggtttaggtgggaggattatttgaagttaggagtttaagataagtttggttaatatggtgaaatttcgtttttattaaaaatataaaaattagttcggcgtggtggtaggtattagtaattttaattatttaggaggttgaggtaggagaattatttgaattaaggaggtagaggttgtagtgagttaatattgtattattgtattttagtttaggtgatagagtaagatttcgtttgaaaaaaaaaaaaagagagatagtttttttaataatggtgttgggaaaattggttatttattatatagaagaatgaaattatatttttatttttcgttatatatgaaaattaaattaaatggattaaagatttaaatttaagattaaattatgaaattattataagaaaatattggggaaaatttttaagatacgggtttgggtaaaaattttttgagttatattttataagtataggtaattaaagtaaaaatggttaaatgggattacgttaagttataaagtttttgtatagttgggtacggtggtttacgtttgtaattttagtattttgggagatagagttgggtagattatttgaggttaggagtttgagattagtttgattaatatggtgaaattttatttttattaaaaatataaaattagttaggtatggtggtatatgtttgtaattatagttatttaggaggttgaggtaggaaaattgtttgaatttgggaggcggaggttgcggtgagttgagatcgtattatcgtattttagtttggataataagaataaaattttattttaaaaaaaaaaaaaaaaaaaaaaaaagtttttgtatagttaaagaaataataaagtgaagagataaagaatatttgtatattttatttgttaagggattaataattagaatatataaggggtttaaataattttatatgatagtttaataattttattaaaaaatgggtaaaagatttgaatagatattttttaaaagaatataaatggtaaatagatatatatgaaaaggggtttattattattattattagagaaatataaattaaaattataatgagattttattttattttagttagaatggtttttatttaaaagataggtaatagtaatgttggtaaggatgtggagaaaagggaatttttatatattgttggtgggaatgtagattagtataaatattttggagaatagtttgaaggttgtttaaaaaattaaaagtagagttattatatgatttagtaattttattgttgggtatatatttaaaagaaaggaaattagtatattgaagagatatttgtatttttatgtttgttgtagtattgtttataatagttaagatttggaagtaatttaagtgtttattaatagatgaatgggtaaagaaaatgtgggatatatatataatggagtattatttagttataaaaaagaatgagatttagttatttgtaataatatgtatagaattggaaattattatattaagtgaaataagttaggtatagaaagataaacgttatgtgtttttattgattcgtggaatttaaaaattaaaataattgaatttatgtatttatgtacgaagagagtagaaggatggttattagaggttgggaaggttagtggaaggttggggagaaggtggggatgattaatgggtataaataaaaataggaagaataaataagatttattatttgatagtataatagggtgattatagttaattataatttaattgtatattttaaaataatttagtgtaatcggattgtttataatataaaggataaatgtttgagaggatagataaagaaaaaaataaaatttattttaaaaataaaaaattagttaggtatggtggttcgtatttgtggttttagttatttagggggttaaggtagaaggattatttaagtttaggttgttgaggttgtagtgagttatgtttatgttattgtattttagtttgggtgatagagtgatattttgttttaaaaaaaaaaaaaaaaaaaaattaaagataaaataaaataaaatagattaataatgatagtatgttgtgaattaagagttatagtaatttcgtatatttgagatttattatgttattttttatatatatatatatatatatatatatatatagagagagagagagagagagttgaaaatagtatagaaggttgtttttttttttttttttatatttttatttgtgttcgagtattgagtagttgttggaagtttttaatttttttgttgttatttgtagttcgtttttaagggaagataaagggaaatgtttagtttggggaaagtagttttttattttaggatgttttttttattttatatttattgtattaagttggatattgtgttagattttaagagtaaaatattgaataagataggtattatttttgtttttatagagttaatagtagtgggggaaatcgaattttttgggtaggaaggtaaggagaaggagtatttattattattagtatatttagtattatgttatagttgttgattagaaatataagttgttttttttttgaggagaatttagttgttattcggaggataaaattttttatttttatttgaaaaggtagagaggaagaggtgatattagaaagtaaggttatttgggttttatttggtttttttttagattttatttattggaagtagttttgttgttgggaagtgttttttgttcgatttttatttgtagttgttttagtaattgtatggttcgtttattaggaattgtttggttgatattgataagagcggaggagaattttgtatagcggcgtgtgatttaggagagagtgggaaggaaaattatatttattttttggtttaattaatataattttttaatttttttagttaatttatttttatgtgatgtgattttatttttagttttttttatttatagtgtattatttattatgagttttattatttttttagaatatttgtttatagcgtggtttatgatataattgtgattttggttaatttttataatgatgtttagagttttgttttttaagaattttttgttatttttgtttttttttatatagtggggtcgagtatttaatttttttaggcgttgggggttagtgtttcggacgttttgaatatttatttttaggattagtttaaatcgtggttatagtaaggtaagtatttgtttttagtatttgtgggtttaattagaattagaggttagttagtaaggaatgttggagggggatgggagggagtggggtattatttagtttaatggttaatagttagttgtgggggttggggggtagtggttggagaaaggtgagttaaaaagtagtattattgttttcggagtaaatgaatgggaataaaggttgatgatattaggttagtaggagtttaaggttagggtagagttatgtaagattaagagagttcgtggtttgttgggtattaaggattagaatttagtgatttgtttagggtaggaatatttttttttgttgtaatgttacggaatcggagaataatgtggatatagagaaaaatagtaatggtatcgtagtagttagttagataagaatttaggtgtttttgtgtgattggggaataaatagaggattaaaagagaatgttagtttgttgtttttagtgattatgaataaacgtatttgtttttttggggatgatgtattggataggatagaagggagagacgtaaaatggaattgttttttgtttttttgtttaggatttatgtttttggttttttttttgttttttgagatagagttttatttttgttatttaagttggaatgtagtggtataatttcggtttattgtaattttcgtttgttttttaggtttaagtaatttttttgttttagttttttgagtagttggaattataggcgtttgttattacgttcgattaatttttgtattttagtagagatggggttttattatgttggttaagttggtttcgaatttttgattttaggcgattcgtttattttagttttttaaagtgttgggattataggtgtgagttattgtattcggtgttttcggttttagagataggttgttttgttatttaggttggattgtaatggtataattatagtttattgtagttttaaatatttgggtttaagtgatgtttttattttagtttgttaagtaattgggattatgggtgtgtattattatgtttggttaagtttatttttaaattttttgtagagataaggttttgtcgtattgtttaggttggtttcgaatttttggttttaagtaatttttttgttttggttttttaaagtattgggattgtaggtataagttattgtatttggttatattaggatttatgattataagtttattatagtagagtttagggttgagtttgggttaggggtttgagtattaagatttgggggatttttagtttttacgtgttattgtttgattgtgggttagtagtaggggtagttttagggattttacgtattgaggattttatgggggagtaatattgtgataagtttaagtaataagttttttttttgagatggagtttcgttttgttatttaggttggagtgtaatggcgtaattttggtttattgtaattttttttttttaggtttaagtaatttttttgttttagtttttcgagtagttgggattataggtcgcgtatatttggttaatttttgtattgttagtagagatagggttttattatgttggttaggttggttttaaatttttgattttgtgattttttcgttttagttttttaaagtgttgggattataggcgtaagttattgtatttggttatttttttttttttttttttttgagataggttttattttggagtgtatggtttattgtagttttgattttttgggtttaagtaatttttttattttagtatttttagtagttgtgattataggtatatattaatatatattcggttaattttttattttttgtagagatgaggttgttgtttaggttggttttaaatttttgagtttaggtaattttattgttttggatttttaaagtgttgggattatgggtgtgtattattacgtttagttaaggtttagatattttagaatgaggcgattttgattttagttttattagagttatgattttattatgttgttgatgaagattggggataaaggtgttgaatggtataggaaataggagttttattagggttatgttgagtgtacggtttatgatagtatggaataggtcgtgtgtagttgggttagatataataaaaaatttatagatgaaaaggtattcgcggtaggaattgtttaggagggcgtagtgttggttgcggaagagggttttaaatggatattgggagaggaggagtaaagaagaaaaatagaagggatggattttaatattgattttttatggatatggttggaaaattagtaaatttgagtaataagagttaggtagatttttcgtatttatttaggttcgggttgtttaagagtaagttgaatgggtattgaaaaggtgggggaatataggggtataaaaagggtttatatttatttgttgttgttatttttgtatttattttaatatttgtttttgattgttattttttttatttagttttttttttttgtatgtttttaagttaatggtttttagttttttttatattatagtaggttggagtgattggagaaggttatttttaagtttaaggggattaagatagggtttgtaggttgggaagttttgttttgaggtttggttttttttttttatcgtgtttagagtttttttcgtgattgaagtttgtttttttttatattttttgtttttcgcgttgcgttgtgtgaggtattaggatgggggttttaagtttagtgggggagatgatagagtcgcgggtttttagggtgaaaatggtgtttttgttgcggagcgatggttttgagaagaatcgtaagatgggttagagttagggaaaataatgagattataattgggtttaaagatttattatttgtggggattttagataggtagacgtggtttagttagtttttttttttagtattagggttttacgtgttgatatttgtgaatgggttttagggtgttttttttttttttgtaattatatgtaaaattatgtgttaaaataatgtgtgtatttttttggggagggaggttatagtttttattatattttaaaaggttttagttttataggaaaaggtaaggagtagtgtattggtggttggagtcgaaagtttttttatttttaaggtttggtatgagggttttttagtattaggatatttttttttgttgtattttttatatttattagattattttttttagcgatttttttatattaaggaaagagaaaagagaattgataatcgtttttttttataatataataaaatattttttgtttagggatgttttttttttttagtttatgtgtttaggaatattttttttttttgattttatttgtatttttatgagtcgttttaggtaagagcggtagtaagataggtaaattttgtttagcgtttttatatatttatttttgattttttttgttgttgttcgtttattgtttagtagaaattgatagaagaatttagggggttaggaatatgttagtttatttgttttttaagaaattagatgtttatattaggtcgtttaaaaatttaaaggttattttatgtatttttttggggttgtgatttgtattttagtagggtcgtttgggggatttgatagttggttatgggttttttgaaggaataaattttttggaggataaattttcggattttcgttattgtttagatgtggggaattaaatatagggtatgaagttgtaatttttttgttgtatgagaggaattgggggaagtaataaatggtaaatataggtagaagggtggtgaatatttttttggtattttttaagatttttagggaaatttagagagataagaatggggttgtttagaaaaggtagggtgaagtttttggagataggttatagtgagttttgttaaggaaatttatagtgaagattttgggaaggttgtttttagtagtttttagggtatttatttttattttttattttgattcggagtcgatcgagtacgtttttgatatttgcgtaggttgttgtgtttttagttttttgttttttgattgcggttgttttggtatttagtttttgtagttgttttaagaatttgggttttgttattggagtttttagaattgttttggttagtagggaggggtgggatgagttataagggagatttagatatttttaaattagatttagattatattttttatttttagtttttgttatttttattattttgtattgtattatatagttaggatatatgtataaagttttttatttttggatttttttattatatatttgattttatattatttttaattttaatttttgatgtttaatgtatatttaaagaaatggtggttaatttggttattaatttttaaaaagtatttaatttggagttaggagatttatatggtaaatagggtgggttattttagtttatttatttgttatggatattataattttttaaattggtaatttacgtgattagagtagaaggtattattagattattaataagttttttaagtttttttcgaattgtttggcgatttcgaagtcgaatgtttatggtttttgattgtttttgtagtgttcggattttagagttgatggagttgaggttattttgaaaagtttttaatatttgttttattcgttgtagggagggtagatgttgtcggagtgttatagggtttgtaggggataagtgggttattaaagattttttgtgaagtttttagtatttattagtttttgagggtggtagatgatgagatattttagattattaggaaataatattaaatatggtagtaataataaaaaaggtttttgaagttattttgaaaatgattttaatttgtttttattttgaggttgatgatttaaaaatggtattagagtttatgatttggtttagagtagttattaggggttataggttatgattattaatttttaggatagtattataggttgtgatttggttgtgtagagatgttatatttttatttttttgaatatttgatttataaaaagttaaggggttttatggtgaagatgggagatttttagatttgtagtatttttttaatttttttttgaagtgatagaaattttagagatgttgattttagttgggatatttgtattatacgttataaaatttttatgttaatagtattattttttttttttgttggaggatataatttcgaatggatttttgtttaatttgttgtagttttagtttaatttgttttgaatagtgacggagatttatattttgggagaatataaagatgataggttagaaggaagttttagtaaagggatattgtaatagaattagtgaaggattaaagggttagatattaggttgatataataaaagtaagagattgttgtttttttttttggggtagaatagatagaagggtagattagtataggggaaagttttatcgttttaagagttttttttattaatttattttttagatttgtttgaatgtgaattggaaatagaagtttattataagggtttagttttatagttttttttttttatattgagtatttgtatattaatttttattttattttttttagtttttatgttttttagattataggtattgtatttattttatgttatcgtttattatttattttatttaggatgaatttattagaagtgatatttaattttttaagttgtagtggtttttggagtttaggattattcgtttggaaagggataagttaatgggagtagggtacggtgaaagatagaaagaaaaaatataattggatatttttagttttttaagtgagaaggagttgtttttattgggagttataggtattgttttgaaaaattttaagagttttacgttgtatttatttttttattttgtgttgatgggtaaggaatacgataaggagtgagacgatttagtgagatagtggaggtagtttagtatggtggtgggttttttgtagttttaattatttagaagttgagacgggaagattgtttgaggagattaggagtttaaggttaatttgggtaatatagggaaattcgtttaaagaaaataaaaaaaggtaaaagataagatagtgtagtggaggtcggacgtagtggtttacgtttgtaattttagtattttgggaggtcgaggtgggaagattacgaggttaggagatcgagattattttggttaatatagtgaaatttcgtttttattaaaaaatataaaaaattagtcgggcgcggtggcgggcgtttgtagttttagttatttgggaggttgaggtaggagaatggcgtgaattcggaaggtggagtttgtagtgagttaagatcgcgttattgtattttagtttgggcgatagagtaagatttcgttttaaaaaaaaaaaaaaaaaaaaaaaagtgtagtggagatgatcgaatgaggaaagttaggaattgtagaggatagagtagaatttgtatttaaatttaagatttttagatttttgttattttgggtgttttattatatttttggggaattttaggttttttagaaatgttaaaatatatagtgtttatttgtatgttaggtgtaattttatatatatttatttaattttaacgacgatgtatataataggttttattttttttattttaaaggtgtgagaaatgatggtatagagaagttggttaatttgtttaagggtatatagcgtgtaagtggtagagatagaatttaggtagtttggttttagaggttatgtttttaatttttatattatattatttcgtgattttattttaaaatgtggagtgaagttgaaattttgtgttttagaatatgagttttagttattagggtttcgtttagggtcgggtttgattatagggaagggtacggggagttaaataggtaatattacgggtagtagttaagtttttatttttgtgtttaaatttagtttaggtttttttgaagttaggagtatcggaattacggaggagaaatagtttcgcgtttttattagcgggtttttttttttttttatatttgaggttttagttcgtaatattagttttcgggtcgtagtcgttatggtcgtagcggcggttatttttcgtagttttattttcggtaattgttagtttcggcgagttcgtttttcggagtggagttataagttttaaagggttttttttagcgcgaaatcgtttttagatatttgagttaagttgtttgattttagttgtttttttttagttttaattattttatttaattgtaaatggaaatatggaagtttgaaatataaattagtttcggaattttcgttgtttttttatttatgaattttacgaattgtaaagaaaggcgtatcggaagttgtggtatttaagttatatttttataaatttagttaggtcgcgttgaaatagttttcggaagtattttttttagatcgtatcgttttttttttttggaagttatataatgatatcgcgttattttcgtttttttttttataggaggtttatacgtcgtcgtttgtgttgtagttatggtaagattggaattcgtgtcgtgatttagcggtatcgtagttcgggtaaggaaagtcggttgttagggttttggaaacgttttgttttgagggtttgcgattttttgtatggagttttggatcgcgtttttggaaagggatattaaagatttttaatttcggagagcgggttcgaggaagggttattgttcgggcgtacgaaagttgtttaaggtttgggcgtatatggggaattttggtttttgttacgtatttttgggaatgggtaggagatttgttttttttttttagaggttgtatttttttaagtttgaacgttttatgtgtttattttgtaggattgaggagtttgttttgtggtgtgaaaatttaaggaatggggggcgggtgttttgttatttgtgtgataggtttaatttttttgtatgaagttcgtttgttttatcggttttattgtttgatagtttattgtgtttgattttttttttcgtatttttttaattagtttttagtgatttttgaaaagttttagtatattttgcgagtatttaatattaatatcgatgggcggcggaaaatagtttttgttattattgttattaaggtaagtgaagtagggtaaggaatagggaatgtaaatgagaattgggttgtgaagatataagtaaaaatgaagtaaggttggggagatttgagttttatttagattattttgattgttggattaagaaaagaaagtggtttagggagagattgatttttttagtatttattatagaaaataagtgattaaagttaagatagtggtttaaggttaagttaaaatattttatttggggaagtggggaggaggtatggttgtttattcgaattcgttaagatttttttgaattacgagtttgtgagattttttttagattcggtttttttatttattttattattataatagtaattttttttgcgaaatttatattttttgagaattggaggattattgggtattttgagggataagtagaaatattaatagataaaaagtgtgaagaagtttgtagatggagggtggaagaagtttgagtgggatatttatttagatgagttataattgatattttttttttgtcgaagtgtgaaggagtatatttatttttttttggtttttaagaatcgaattaatgaatgtaagaatattattttatttgagtatttttttttataaatttaatgaatttttggttttttagatatataacgtttttttttttttttttaagttagaatgtgtagttagttgtggaaatagtttattagtatgtgtttatgcgtgtagggttaggtttgtttttttggtttttgttgtatggtaggtatttaggcgacgttagggaatggatagtagtagggatattgttggttttgttgaggaatttgtagagggaaattttttttgttgggtgttttgtgaaattaataaggtagtgtgaaatattgtatttattttagagatcggttgtgaggtttaagtagaggtgtagtatttataagtgtaatagagaataatttttatggatgtatttaattaaaaattagaaattttattttatttatatttttttttatatttattttgaagtaaatttttttatttgtaaatatataattaaatttgaggtttagtgtagtggtttattcggaggttgaagtgggcggattttttgaggttaggagttcgagattagtttggttaatatggtgaaatttcgttatttaattaataaatttgaaagattttgtttttttttgaattaatttaataatttgatttttggttatgtttatttatttatttcgagatagagttttatttcgttatttaggtcggagtgtaatggtgtaattttattttattgtaattttagttttttaagtagttgagattataggtatacgtttagttaatttttgtatttttagaagagatggggttttattatgttggttaaattggttttaaatttttgattttaggtgatttatttattttagttttttaaagtgttgggattataggcgtgagttattgtatttagttatatttattttttgagattgtcgtttaggttggagtggcggaattattttttattgtagtttcgatttttagggtttaagttaatttttttattttaattttttaagtagttggggttataggtgtgtattattatatttggttaatttggattttgttgtgttgtttaggttggttttgaatttttgggtttagtgattttttagttttagttttttaaagtgttgggattataggtatataggtatgagttacggtgaagttaatttttgattttttttttgtagataggaattgttatttgttttagttttttggagtttattgtaataagtttatataaattaagtagaaaattatttttggcgttggaggtatttaagaattttattttgtttttttttgttttttggtggttgttagtaatttttagtgttttttggtttgtagttgtattattttaatttgttgttgttattttatggtttttttcgtgttttttttatgatttgttattggatttagagtttattttaattaaatataacgttattttatttaattattttcgtaacgattttatttttaaatagggttatattttgatgttttagttggataaaatgaggggtagggtttagtatttagttttttttttattttttaaattattttggtttatgagtttagatggtatgggtgttagtgttggtgttgatgtgatgttattaatgtaagtattagtttttttttataataatttgggtagttagttttgggtattgataaaattgagtttgtgattttggaatattttgattatggggatatagtgatttgtttaaataattgtgatttttagagattttgaggaattgatagtttaatattttaattaaagtttgtaatttataagattttggtttattgtattagtttggagtggtaggttttttgtttttttaaatgtaagaattagaaggtatttagtgataattatatatgttgagtaatgggggaaaaaaaagatattgtttgtttttaaagggttgtttgtaatattaaattttgtgtttatgatttagttatatttttgaataaagttatttttttttttttttgagacggggttttattgtcgtttaggttagagtgtggttgcgtgattttggtttgttgtaatttttattttttaggtttaagttattttgttgtagttttttaagtagttgggattataggtatttgttattatgtttagtaattttttttgtatttttagtagagatagggttttattatgttggttaggttggttttgaatttttgtttttaatgttatttgtttatttgggttttttaaagtgttgggattataggcgtgagttattgcgatcggtttaaagttaattttttgtcgaacggtttatatttggaaaggtgggtgaggaaagggtgatttaggggattgtaaaatagattattgtagattttatttttgtgagttttttgaatgaggttataaaggaatttaaaaattagatttaatattaatttcgaaattttttattttatttagggtgtgggtcgaagatatgtttatgtggtgttgaggaaagtagatattgattttattaagagggcgggagaatttattgaggatgaggtgaggataaggaagggggttgggggtggggttagttttagaaaggggtttatttagatttgattttggtttgtttgttaggtggaacgtgtgattattattatgtagaatttacgttagtataagattttagattggtttttgaatagatagaaggatgtaaaggatggaaaatatagttaggtgtgtattgaaatgagggtaggattagaggaagggtggagggttttaatagaattgggtataggaggttaggggataaaatattttttgtttttttttttgaatttaggttttagttaatggtttggataataagtttcgtgaagatttggagcgattgaagaagattcgggtttatagagggttgcgttatttttgggggtgagtggggggttttatttttttgtttatttcgatttagtattttttttattcgtttttttttttttttaattttttgtttttgttgtgtatgatttgtgatttttttttttttatttgtagttttcgtgttcgaggttagtatattaagattattggtcgtcgtggtcgtatcgtgggtgtgtttaagaagaaataagtttgtaggttttgtttgttaataaatagtttatatatttatggttttttgttttttttgtttattttaatagggaatgttaaagtgttgggttttttttttatttagagttgttttatttagttgtttatatagtgttattagttttagtagtggtgatgttgtagattttttagtttttttatatgtagttagtgatgtttttttttgtaaagagaaatgtgagggtaaaatagtttagttttgaggggttgatttagattagtttagagattaatattttggggttggtgtgtagtattattgtggagtgggttagttgagtttagttagttgtagttaaggtgagtttgtaggttttggttattttgggtttttttgtttttgtttttgtttttttttaaggggttatttagttataagggaaaatttttcgggttgtgatcgaagtaataaaggtaaaaacgcggacgttggttatgaagggtgtggtttttttggtggagtacgtcggtgggttgggatggggagcggttggatagatcggttttatttcgtttggtgttattttattcgttcgggttttcgcgttttgtcgcgttgtttcgacgtcgttttcggcggggatgggagcgcgtaacgcggaagcgggcggtagatcggtcgtcggggcgaggcgggggaggggtcgtgagtgtcgtagtcggttagttatggagcggagtttgttggcggcgaggtcgcggcgataaggtagttattttcgtagtatgtttcgatcgcggttcgtagttgtatcgttttttttcgttttttagggtgcgttggtttcggtcgcgcgtttagattttcgtatttcgggcgtggtcggttaagttttcggtcgtgatttaggttcggggagttagttttcgtttttcgtttttacggattttttcggagtacgtcgtattatgtagtttaggttttttcggcgtttttttttcgtcgttttgttgttggtgatcgtttggatttttttcgggttttcggggttgggggaggagttgttgagttttttattagtttttttgtttttagttttcgttttatcggggtcgtttttggttttgtttcgttttttgatttttaattaggaagtttgtagtggtttcggggtttttttttttttgtttattttggtgtgtacggtttcggagaatttgaattagagaaacgttattcgggtttcgtggggcgggttgcgcgaggttcgggggtttagggtatagacgttatttttgttgggagagtcgaacgtatagtatttcgtgtggggtttttaggggagtgatttggtttcggagttagtagtttagggggatattttgtaggtcgttttttaggatttttatcgtaattttattttaaagatttttagcgggttgaattgggttgagaaatattgttttatggttcgatacgtttttaagacggacgatgatgtgtatgttaacgtttttgaattggtattagagttggttttgcgagggggtcgttgggggtaatgggagagaagtacggaattttagagagaggttgagtaggaaggaggttaggttttgtatagcgaggaagtgttttttttgtatttgggtcgggtgtattggcgcgtgaatttttttcggatatcggggggtaggtatcgcgtattagaggagtagtggttttatatttggggtttttttttattttatgttttaggtacggggtatgtgttgttagcgtttgttgtgtagtttatttttaaggtggttagtcgggtatttttttttttattagaggatgtttttgtgggggtaagtgttcgacgaggaggtttcgttttaatatagtgtgttaagttggttggtgttatttattattcgttagatcggtgttgttatgggaaatttttgttgacgttttataggttggatttttggaagatgtaggaagtttggaagttggtgggtggttttgacggggaaaggattgcgtttttttgtttttggttttagggagttttgggtattttgcggtgtcgagtaatagtttggttttagagttgagagtgtttggggttataggaaaggtaggaataggatttttttttttttaggtttaacgtaggggtttttattggttgtagttgatttgtttttttatattagatttttagttttattaaagatagcgatatgggagatatttaggggtttggttcgttagtttaaaagatggttatcgggaagagaaaaagaaaaaaatgttgtagttgtttttttaagttagggtagaagaggggtgttaagttttttaataaatttgtttttattttttcgagtgtagtgtggtttttattaggatttttagaatattataaatttggagagtttagaggttgttagattttgttgtatgggaaggatatttttagggatatgggagagaggatagtttttttgaggaggaaggtttttaaaaggtaaagttaaggttatagtagttataaggtatggggtgggggtagaggtaggatattgattttttcgattttagaatggttttatgtttggtaagggggaggggaataggtttataagatgatttagatatattatttaaaaaatcgtttttttttttaatattaatttattttaggagatagttgtttatttttagttggggaaggggttatattgtttttatttttttgttttagggaatatttatttttttataggtgattttggggagagattgtttttaggtaattttggagtttggtttagcgtataaatttgtttagggtagatggtcgggttttcgtgggtttggttttcgtttttttatgatgttgttgttgaaggttttgtcggattttgttttggggatcggagacggggaggatataggtatagagtgagaagtggtaggttgataagggtagaggtataagtaggagggtgtagtttgtggaaggttcggtttatgttaatgtttatttattttgtgttttttatttatgatttttttttttttttttattaggtttgtcgtggagttgcggtttttttgttttggttttggttggaagggagttttagtttgcgggttatagttttgagggaggggataggagtgatatttgttatagtttcggagttagggaattggtagtatttatttgttggtcgtatttttggggataagttatggtggggagaggatgtgggggagaagacgggtttgggtatttaggggtttgttttatattagtttttttatttgttttttttttttttgttttagggagatgatatttatttcggttagggttcgtgggtttagataaataagttttgtaggtatttgggggtgttatagagggataggatttagtaaggagttataggagggtagtattaaaaagagaagttagggaggttgttgaatttttttatttaagatttttagtatgagatattaggagagttttttttatttttaattttaaattatattttttttagtagtaggggttttattttttgtagtaggggaattttatttttaataggggtaattttattttttttagtaggggggaatttgattttttttaggagagggaattttattttttttagtagagggaaatttgattttttttagtagggggaattttattttttttagtagagggaaatttgatttcgtttaggagaggggaattttattttttttaggaagaggaaattttattttttttagtaggggggaatttgattttttttagtagtggggaatttgattttttttagtaggggggaatttgattttttttaggaaggaggaattttattttttttaggacgggggaatttgattttttttagtaatgggggggattttattttttttagtaggggagttttattttttttagtagggtttttattttttatttttggcgttgttttcggtttttgtatggattattttttaggttatcgaagttgggtttatcggtttttgaagggagggagggagaagtatggagttataaggaagaattttagtttaatagttttagtttaattaagtttttagtttttggatgtttttggtttaaatttttatttagagtttatttattttaagttttattttttggtttatttattagggattagtatgttggtgatgtttttagtgtgttttatttttagtatatttttaaaggggtagaattgaaggttatgtatagggtttgagagtcggtgggtgaggtagggttgtttaagggagggtgggttggttttgttttgttttgtttagatgttgataacgttatttattttcgttattagtagttttttttgggagaaggttaggtgttttgttttatggggtagggttcgagtgtttagaggttggtacgtttttcgtaagttaaagatttttagttggtggtttaggttagaggtggttatgtatttggtgagagaagagggattaattaatatgttagtaaatgggtttattaagtaagttgtggttaagtttaggtattaagtttggttggggagaaaaagattaatagtaataattattgttattattttgaatattttataggtatttttttagttaagttgtatataatttatattatttttatttttttttaagaggtgaggaaattgaagtttagggaaaggaaagttaggttagtgaatggttaggtttgtttttttagtatttgtttttaatttgttaatattatatagtttttttaagatacgggcgttaaaaggaacgtttatacgataggttgtatttaaatgtgatgtttttttgtatatatatgtagtatatagtttagtaaggggaaggagtatgtgtagtggttagaaaggttttatgggaaaggtgggatttgagttattttagataatttttaaaaaattataggaagtagatatatagtaggtttaaatgtattaatattagagtgttgagattgagagggaagtagaggtttgttaggattggtgggaaatatggttaggaaaattaggagtagataatttgtgaggtttttttaaagttagattgaggatttatagtttatgattttaatattgttttttggtagtgataaattataaagtgaaggttttaaggatttgagaagatttatttagggaagtggtgaagtaatgtattggaggtttttgttttgtttttttgtgtgttttttttggaaggaaggagggaaggttggtgattaaattttttttaggaattatgtattgtataagttgtttatttttagaagttggagttttttttttttttttgagatagggtttttttgttgtttaagttggagtgtagtggtatgattttggtttattgtagtttttgtttttttggtttaagtgattttcgtgttttagttttttaagtagttgggattataggtatgcgttattatcgttaatttttagtagagttagggtttcgttatgttgattacgttggttttgaatttttggttttaaatgatttgtttattttggttttttagagtgttgggattataggtgaggttggagtttttatgtttaagttgttttttagagagggaagttgaagggggattagttaggtaggggatgtatgtttgttaagaggttaaggagttttttttttgttttggttgtgaatttaggagaagggaattgaagagtttttatgagtagagatttgtatagtgatggagtttaagagaggattagttggatattttcgataagataattagcgttttgattttattaaagagaaaggttattagtgtaaattaggaattatcgagcgttcgtggaatatagggttatattttttggtgaattaataatttaaggatgtatgttggttttttttttttttatatatttatttatgggatttttgggtaaagattagtttagtgttaaatgggagtttattgtattattagtaagtagtagttcggttttgagaagttaacgtaatttaattataatataagttattagaatattttttaagaaagatggttagttttattattggagttttcgtggtttgataagtttttgaggaggattagagaaaagtagggatgggttgaagattataaggattagagttgtttagttttaaggtgttgattaaattttaggttttagcgaattagtgattaagttttaagtataggagtggttgatttaggtagtttacggagggtaagttatagttttggtttagtggtttagagagggtagaaatttttgggtaggttttttgatttttttagagttaggttggtataaatatggagtaaaaagggtagaattaaattatttatttataaagatataattataaaggttagatacggtggtttacgtttataattttagtattttgggaggataggcgggtggattataaggttaggagtttaagattagtttggttaatatggtgaaattttatttgtattataaatataaaaattagtcgggtgtggtggtatatatttgtagttttagttttttaggaggttgaggtaggagaatcgtttgaatttaggaggtggaggttgtagtgagtcgagattatattattgtattttagtttgggtgatagagtgagatttcgttttaaaaaaaaaagatataattatgtaaaaatagggagcgggtggtggggggggtggttttagtattttggagattttgaataagttggtggttaagttggatgtggtggtttatagtaattattttgtaattttagtattttgggaggttgaggtaggaggatcgtttgagtttaggagtttaagatagagattagtttgggttatatggtgaaattttatttttataaaaaatagaaaaattatttaggtgtggtggtgtgtatttgagttaaattttgggtgataggaaaattttgggagatgagagtaggttaagagaaattttaggaggcggtgatttatttagtgatggatatattgagtttgggatgatagaggataattgtgtagaaattaatggtattatttgagttaggcgtggtggtttatgtttgtaattttagtattttgggaggtcgaggtgggtggattatttgaggttaggagtttgagattagttaagttaatatggtaaaattttatttttattaaaaatataaaaattagcgtatgtagtggtatgtatttgtatttttagttatttggaggttgaggtagaataattatttgagtttaggaggcggaggttgtaatgaatcgagatcgcgttattgtattttagtttgggtgatagattaagatttcgtttcgaaaaatagtaataaaataaataaatgtattatttggttaattatttttaaaaattatagttatggtcgggtgtagtggtttacgtttgtaattttaatatttgtattttgggaggtcgaagtaggtggattacgatgttaggagtttaagattagtttggttaagatggtgaaattttatttttattaaatattaaaaaattaattgggcgtggttcgtgggcgtttgtaattttagttatttaggaggttgaggtaggagaatcgtttgaatttcggggggtagaggttgtggtgagttgagattgtgttattgtattttagtttgggtgatagattaagattttgttttaaaaaaaaaaaaaaaatagttataagtttttatatttaaaggataacgggagtattatattagggtaggtttaacgatttatttttttgtttttagaattttagcgtagagttttgtttatagtaggtgtttagtgaatatttgatgataaaaggaattagaggaaaatataaattagatagaaaagttgtggaaaatgtagatatttttttaggaatagtagaaatttaaagtagatattatttttattttttatattagttagatttggagagaacgattattttgaatgataatgatgaatatagcgttttttattttgttaagcgttgtgttaaattatatgttttaatttattttaatgtttataatagtttatatgagggttttaaattaaggtttggtaaattattgtttatgggttaaatttggtttattatttagttttgtatagtttataagttaagaatggtttttatatttttaagtggttgaaaaaaaattaaaagaatattttgagattgtgaaaatcgtatgaaatttaaattttaatatttaataaataaagttttattggaacggggttatattatttatttaatattgtggttgtttttgttttataatatatagtcgagtggttacgatagcgattatagtattttgatttgtattgttgttttgtatattataagttatagtgatatagtcgtaagtgttttatagtattttaagtattttatatattatttattattatttgtgtgaaaagatgtttttaaagatgaaatatttgtaatttttatagattagtatgaatatgaatatttatagttaaatttgattatttggaatattaattttgtatattaattaggtaaaatgttaattttaaaaagagaaatttagttttttttattagtagatttgtattatataaatatatttgattattattattttttttttttgagatcgggttttattttgttgtttatgttagagtgtagtggtatgattatagtttattgtagttttaattttttgggttgaggtgggaggattattttagttttttgagtagttgggattataggtatgtattattatattcggttaatttttttattttttgtagagatagagttttgttatgttatgggtgatatggtttgtttcgaatttttgggtttaagtgatttgtttattttagtttattaaattgttaagattataggtatgagttattgtgtttagttttatattatgttttgtttgtttgtttgtttttgagacggagttttgtttttgttgtttaggttggagtgtaatggtatagttttggtttattgtaatttttgttttttaggtttaagtaatttttttgttttagttttttaagttgtcggaattataggttttcgttacgatattcggttaattttgtgaatttttagtagagatagagtttcgttatgttggttaggttggttttaaatttttgattttaggcgatttattcgttttggtttttaaagtgttgggattataggcgtgagttatcgtatttggttatattacgtttaattttataatttaaaaatgtgtgggttaggcgtagtggtttacgtttgtaattttaatattttgggaggtcgaggcgggtagattatttgaggttaggagtttaagattagtttggttaatatagtaaaatttcgtttttataaaaaaatataaaattagttgggtatgatggtaggtgtttgtaattttagttatttgggagattgaggtaggagaatcgtttgaatttgggaggcggaggttgtagtgagtcgagattacgttattgtattttaatttgggagatagagtaagattacgttttttttaaaagatttaaaaaaaaaaaggttaggcgtagtggtttacgtttataattttagtattttgggaggttgaggcgggtagattatttgaggttaggaattcgagattagtttgaataatatgttgaaattttgtttttattaaaaatataaaaattagttaggtgttgtagtaggcgtttgtagttttagatattcgagaggttaaggtaggagaattatttgaatttgagaggtggaggttgtagtgagttgagattgcgttattgtattttagtttgggtgttagagcgagattttattttaaaaaaaaaagttgtgataatttgtttttttttggtatttaaatgtttatatggtattttttgattttattttttattagtaaattataaaatatttattatttgattttttatagaaaaagtttgtggatttttgaaatggatatttatatttttattttcggggttaggaaattgtggtatatagaggttatgaaatatgtttatatttgtaaggtttattcgtggtaatattgcgatttaaatttgggtattttggttttagattttgtgtttttaaagtatattgttttttatatttttttgtttatttatgatttttaatattttattttattagtgatttacgtgtttgtagaatttattgttatagttcggattttattacgatgatagagaatttttgttagtggtttttttatagttggattttataaagatatagtatttggaagagaagaagaattaaagttgttaatatatatttaagtttgaggttattaaatatgggaaagatgggaatttaagattaagagataataaaaaagggaaataaaagggtaattttaagggatttatgaagtataaatatagaagaaaagtaagttaggatggttagagttaaaattaagttaggtattgattattgttgtgttcgagatggatgacggtattgtaagggttttgatttataatatcgagtcgtttagttcgagtatttagagttgttataattttttttattgatatatttaggtaggttagaaattttgtttttgattgagagagaaagatagagagaatgatttagttttgattgttttttgtattttttttgttggggttttaaaggagaggtggttattttaagggtttttaattagtttttgagttttatggttatttatagttgtagttaggaggaagtggaagggtaggaatttaagtcgtgttattcggttatagcggcggatatagtggagtttaatgttttgattgttatagatgtggagttagcggttttgagtaatagtaagtagtgttttagaatggagaaatttgggggagaggaagagtggtttaattgggaaatgaggttataggttattatttaattaggaatggattattttattttaattgatcgttgatagtgaggttattgatcggatgtttcgtatcgtttttatgacgttgatttcgtatataagtttttttgttatttaattaagggtagttatatgatttcggcgttttttaaaagttaggtgtttgttggaggtgaggggtaggtagggtgttaaggtaggggattatcgatttagataatttgaggtttgttttacgttagttttatttttttaggcgggtagatatatgttgttgtaggtgtttatttttatatttaagtaaatcgaaggattttttttttattagtaatttaaatatatattgggaatggttgaagtggttaaggaaatatattttagtttaagagttattagaatttaattttattttttagttcgagagtagtttagtttgtagggtttaaattgtcgtagatttaagttaaagtgttgggaaagagaagagtgaaaaaaaagagtgttttgtagtaacgtttttttttagtttttatttttttattgttttgtattattaattaattttttggtttttttatttttttaggtttattttggttgtatttgtaatgtttatagtttttataatgttagtttggtatatttttgttgtgttttttttattttttttttttagaaatttgaaagtaagggttaggatggtagtaaagttttttaatatgaagtaagtatattaatataaaaacgagaaaagatagttttaaaaggtagggaatgggggtttagattagggtttatttatttaggttttttagtaagtagtagtttagaacgagtagttttgatatttgtttttttttttttagttttagttattttaagtcggtttcgagttttggttttagaatgtggtagttgtaatattgttggtggggaggagtggtagaagaattataggataagtggggttataggagagttatttgttttagtttttatttaatttatttagatattttttgtttttagtattttttaatttttcggttggattttatttttcgggatttgttaatgcgatagaatttttggattatttttatagggacgggggcggggtttgggaatggattttgggtttaggggaaaggaggacgtaattagtagatagttttggattgattttaatttttttatttttaaggaacgaggcggtttgtttcgttatttattaggttttacgtttatttcggataagtcgcgttgggatttcgggtttttttattttcggggttttttcgggatttgaggttttttagagattcgagatttttttaagatgtaagtattttttggtttttgaggacggagttttcgattttttttgttacgaggaggttttggagaggtttcggttgtggtcggaacggttttttttttttagtatcgtcgcggtttttataggtatattaggaatttcgtatttacgtttcgtttttcgattttatagttaaaaatttcgttttttatttagggaggtttttattttttttttggtttgaagtttgttttttttgggcgggatatttttgttcggtttgggggttgtttttatttcgtttattcgaacggcgatttacgtgtaaaattttttttagttgttatatagtcggtttgaaaattttcggaagttttttgttttttatttaattagtagcgtattaggtatgaagttttttaggtgttattttgagtgagggtacgttttttttagaggggcggaatagtttttggtattttatcgcgagcggtagtttatgtaagagtgatttaaaaaagaaaggtaggttcggagttaggggttaagtagcggtgcggtttttttttttggattagtttttttattttgtttaaaaatgttttagtttagtttttttagtagaattttattttttaaatatgttagaattatattttttattaagggttagaaagaaattttcggtatagtttttttttagtattttttgtttattttcgggtttattattattgaaggaagaacgtgagtaggttaggatttcggttgagaggtttggggttttgcgtttcgtttattattttttggggatagggtggagtcgatattcgggacgggggggaggttgcggtgttttttagggttattttttaagagtgttattattttcgtaggttagattagaaaagggagtttaggtattttttagagagtgagatttagcgtttttgtttcgtatttagtaggtttttattttcgttatggcggagttgatttagaagaagttatagggagaagtggagaaatattaatagttatagaagggtaagggaatagggtcggtatggtttcgtttaatgtatttataatttaaagttattatcgagataaggtttgttgttttatttgggttttcgcgtgtagagattttttcgttttagttttagtatttttttttgtttatttattcgttgtttttatttttttttgtttttttagatttatatttatttgattaggattgtggggataggtggtatatttgatgtttttaaattgtttttttttttatttttagatttaagtaaatttatgtcggggaggtagaaatttgaagtataattaatagaaaataatatcgtgaaagaggtgagggattgggatttgtggggcgaggagggatttgtattagttatggttttgattatatatgttttatttttttattaggaattggttttgttggatgggtttaacgtggtttttaaatttttgggttcggtgttagttaaataggagttgggggaggttcgggttatagtagggaagaggttggattatattatagttgaaatgtgagtttttattttattatcgtgtgttgtattttgtgatgtaagtgaattattggagtagaggtgttgaattattgtagaatagttttttatagtggtttttagttttttagtttttttaatttttttttttttttttaattttttttttttttttttttttggattttaagttttttatttattttttttttgcgtttagtattttttatagtgagttttattaatttttttttttttgtttgttttttttgtttttttttagtaagcgatacgaattttagtttcgggattttgagcggtagttagagtaatagagggagatttttgtttagttgtagtaggagttttagcgggtttaggtagtaaaggtaggggtttttggtaaggtttgattttatggtggggggaggggaggggaggggagggaatgaggtagttttaggatttatattgtagttaataaaatgtaaaaatatttggttttgttttttgattaggtatttttgttatatttttatagttttttttattttaatatatattatttgtattatttttttaggtttaaatttttgtatttggaatttttttgtggtatagtgtttttttttgaaagtgaaattttaaatgtttttaaatttattttttgtttgtatatataatttttaatttttttttattttggttggtatgatttttttggaagggtatttgtaatatattatattgttaggaatgtcggtttaattgaaaaagaatatatagttttttaatttgaggttttaggatgaaatgtggttattttttttgttaatagttttggtatttttattagtattttttagtttttgtttttttagaatttgtttgaatgtagttttaaattgatttaaaattttagtatgtaatgttttatggtattataagtttttttaagtttatatgttgtttataaagttgttttgttatttttttgttttaaaattgttttatatatatttgtagtaagggattagtggtagagaggttattggagagaaattgttttgaggaaattttttttattaatattttattttttgttttgtttatggggatagaaaatattgtgtttttttttgttttatggtatttatttttagttaattttttatttttatttatagtagttagtttatatgtattgtaaggataggggagtagaatttaggtagtgttttggtttattattttagtgttgttatagtgatagaaatttttagagtgggaagaagagtttttgcgaggatttatattttgttatttttttttgttttggggtttagagttttgaagtttttgtttggtttttgtatgttaggatatggttaagaattagaaattgatgcgtttttttagtattatttgtgtgttgtatttatggaaggtgggaagttatatataggtatttaatttggttataagatattagtttttatagggttggattttttagttgtttggtaaattagtggtattttattgttttagggtggttggttttttttttgaatttttgttttaatgtgatataattgttattatttaggatggttatttatatttggtatgaatattatgatttttgtaagttaacggggttttttttttagaatagtgttcgtgtaatttttttttttgtggttttgattttgggaaaggagttttttttttttttattcggaggagtttttgaggtagacgggttattggtgacgttaggtgtagtagtagaggattttcgtcgttgtcgtaggaggaaatcgtgtgaagttttatttatggcgtagaatatattagtcgaggttgggatagttagttttgaaggtttaggggatggatgtaaagtatatatatagttgttttttttatagtcgtttagatgtggaagtattttatttttttttcgagtttgttttttttttatggtttttgatttcgtttttttggtagtagttgtattagtttatattttgaagttattgtagagttacgattgttttttttaaggatacgattgatgatatttggagttttgttttggtttgttatttggtagaataggagattaaaagagtaattaattagttatgattttttatttttttatttttagttattgaatttaattataaaatgttatttgtgtttaaggttttaaaatgaataggaaaatttaatatggtggttttttatattttataagttagtttatatggtgtttagtgaaatagagttgtttttttgtggggaaattgttgttgattttgaaattttaatacggcgattaaaagtttaaggtgtagtaattaatgtaaaatagttattaaaataaaataaattttagtttttattgaagattagagtttagaagataaaattaaaaataaaatataattgttaaaattaaaggttaaaattaaaattatatttaattttatttggttgtttaaattttagataatatttatagtttaataagatattattttttattttaattttattttaaggtttttttattaaaatgtttttatagatattgttatttttttttaattttatttggattcggatgatacggtaattagaggtttttggtttagattttttttttttatatttagttttttcggaggttttttttgtatttttatttagcggggagttataggaggttgagcggcggtgatttcgagaaggtttaggggaggaggttggtggggagaggtggttggggttagttggattgtgtagggatggattgttttttaaggtagagtttagtgacgagatagatggttattttatgtgttaggaataaataatatgggattggtatgaaggtagggaggtttaaggaagaaatatttatagagtgagggttagcgttaaggttagagttaggagtagagtttatttgggttagtcgagttagtagaggagtaggagttgtaggcgttttattttttttagtattgggtcggttataggatataagcggggtagggattttaatagagtttaaaattttgtagtggtaggagattgggaggattagagaaaagtggaagttttaagaaattattttttagttagtgaattttttattttgtttattgcgagatgattaatgttggtcgaagtattcgtggggtaggagggttattggaattaggtggttttattttataggatatacgatggttgggttaggggggtaataggtagagtttaggatatgatattaattttttatatttggttagaattttggagttttaattttattcgttagttatttttgagtttttgttagtggtcggagtttttgtagttatttttggatattatggttaggttggaggttatagttacgatatttattttggagtcgtcgtaatttagaaaggattgtaaatttttgggaaggagtttttaaattgtaggagttaaaatttagggatttttgattttttttttttttttttttggaatatggatagggaagtttagtatttagtttagatatttcgtttattttttttcgtttgttaaaattgatgtatttattttgcgaggaaaatggggatggggtgaaagttttaattttatttttcggttatagagagagaatatttttttttttaaatatatatagttatatttaatttataattatttttttttagtttttttgatttttcgatttttttttgtttttttttttaatttattatggtttaagtattttatttgattttttaaattgaattttttaggtagataacgagtttgttttgtagatgagaggattggatagtatttaattcgataggattttttatttagagaggataaggaatttgtttaaggttttagtatttgtttatttaataaattttagtaatagagtaggagtttattataaaatttagatgtgtttacgttttaggtacgttttaagtatttgataaatataaatttatttaatttttataatagattaatgtagatgttatttttagttttttatttatagattattgaggcgatttggtatagaaatagatttggttttgttttatatttagttatttgtgttttatagttttttgtaaggggcgggggggtttgttcgattttgtagtttatttgttatattattgtaatgatatatatatatattattgatttttaatttatttttggaggttgtatttagtattataaggttttttaggaaggtgttaaggtatgggattatattttgaagttaggggttagggttagaagtgtttgttattgacgtgagggttttttattttttcgtatttgttttttttattgttttagagaatagattttattttttttatttttttgtgttttttttatttattttttaggttgtttttttaaaatatattttttatttttttataattattatttttacgtttattatttcgttagttatttattttatttcgggagttagatttcggggtttttttggagtgtggttttagaggagattgtagttttattttttggtggtgataaaataaaagagatatgggggagtagtagggaataaggagaggtgggaatgttataaattaggtttttatttgtacgagtagttttcgattttgggaataattatttttttcggagaaaatttggtagaggttggaaaagattttgaggttgtttttggggaagggagaaaagtggttttgaggataggtttggttttgttattttttttttttcgttttttgaggaatttttattttagtttaatgttttagttttcgtatttggttgtttttttttaggttgttcgaagtttgtggatggggttggattgtagggttgatattacggtataaattgaagagaagtttcggagtagtcggtatttttgtgggggttaaagaagagagttaaggttatgggaggtttttttattttatggttataaatcgtagggtaatttttttttttatttttgttacgcggatttatttttttaggagtcgggttttttgtgggggacggagtggtcgtatggttatttttttaggtttttttttagtggaagtagtttttaggatagaattaattattgtttttgttattttgttaaattgtgtgatagtagttcggatagatgggtagaggtgagaatgttttggtcggtttttgtgattttataggttttttaggtattgagaggggattaaattgagaaaaagtttttgtagggtagaggttagaggttaaagtttatagttaagtgaggttagttttttaatattagggatttgaggattttaggtggttaaggaattagaggggtatagggtttgaagggtaacgattaaagggaaaaggggagaattaaaatggtaggtggaggaggttaggagttggattaggaaggggtggaagtaaggaaaggatttggagttaaggagaggttagtaaggggttagggggtataggggttagaggttagggttttatcgtatttagtagggttagttgttcggttaagtggttagcgaggaatattaggatattcgtggggttagtagggggatcgtcggggagggttaggggtttaggaaggtcgggggtttgggggtttattcgggatcggagattgcggatgaggttagcgttgttttttttaatatttttttttgttgtatattttgtttgaagtaagaagtttttaagtcggttaagttgatttttggttttagagttaaaatttttagggtgagaggttagttaggttgatagtatagagatggttattttgggagaagggaattagttaagggtgagaggtaaagttgtagtttgggtagaggggattgtgagattaagaattaggggttatttattttgttgttttttttagttcgtcggtaggatgagatttaagggtttttagtttgagggggagaagaggatttatttgtttattttttttaaatttttagtggttttgattattttggtgggatgttgcggttttaggaaattcgggtagatattttattattttgcgttttttatgattttgatttgttagttataagttttagtaaggtaggcgtggaggtgaaggttcggtgggtagttaggaaggttgatatgaagtttatattagtttttgatgttcgggtatttagtaggtgtttgattagggtttttagagtgttagttcggagtcgtcgggaggaacgtgggggaggtatagggatttggagaatatagagagatgatcgttaatttttttttttattttgtatttagatttttgaggataattttagatttaggagatgttttagatttatttttttgatatttagagagggtaagagttttggtttatgttatatagtagagtttaggattttagaattttaatttagtattttggttagaaagttagttagaggaaggaaaattgggaatgaagagttagaggtgagaagttaaagttatgattttattaagggattaagaggtcgatattggcggtttgtgacggtaaatacggtattatttttttttttattttagacggatataggggtttggaggagtaaggaaggggaagttagatagttttatattattttttattgtttttagtttttattttaggttttgtttttttttttgtattttttatttgtggtggtagggtatagtattagcgagtgcgaggaagggttgggggagttggtgattttaggttttttttattggggtttagatagttttattttagtcgttttagggtttcggtggagtcgaaggggttgtagtggaggcgtggatggagtataggaattttgattttggagatttttaaagttttttttttttagagttgaatttatatacgatagagaagtagggtataaagggtaggagagggaagcgagaggtagtaagttagaggtagcgattaggggtagttgaaattttagtttaggtattgtcgtatgtttcgtttttttcggttaaggattatattagtttagagaattagttttttttaggattttttttattttggtttttcgggtagcgtttttattattttagttttaagggattttcgaaggtagtagttttaattttagtataggaaggaaaaggggaagtgggatgatagggggttgggggcggtagatttagagagttacgtggttttagtttttttttcgatcgatttcgaaaaattagttttgttagttaatttgtttttatttaggatttggatttaggagtttagggtttcggggttttaaatttaaattttggttttttttgaggttcgaaattttgtttttggttattattattaatttttaatgaaaatagatgattattttttatttattttaggattttttttttaggttttagaatcgtggtttttcggtttttatttaggatcggggcggggcgggggggcggggggaagggggagagagggaaggaggggttacgaaatttgagggttttttttttaattttagagttagaggagttggttattgtggaaataaattttttttcgttaaataaaaataaggagggagatagggattaagatacgattgtttagagaggtaggtatatttaggtaggtagaggtggagggttaaagattcgtagggataggatagttagttagaagttttaggtaggaatagggtaggtttttgcgggtaggttttgagttatattgatagagaattacggagacgttaggatttttcgtagtagagaaacgggtcgatatttagggaggcgcgagaataattgaggtaaggaggaggagatgtagggatttagagataagagaaaagtggagattttagaaatatatacgttttttattttttattattcgcgttttattttttttttttttttttttttttttttttgtttttcgtttacgattaggttatttgggtttttatttttttcggggtttcggtttcggaagttgtttagtacgattttttcgggggggttcgtgtttaaaagtagtcgtaggggtcgcgggagtatggtcgagtgaaggaattagcggggtcgggttatgggggcgtttggggagagacggggtggggtgggggtggagagttaggtaggcgcgggggaatcgggtagggaagggacgtgggtgggtgttaagaagatcggaagggagttttgtaggaaggttgggggagggggtaatagaagggtggaataggggggtttttggtgttgttggggaaggaggaggttacgagtacggggacgcgtagggtgtttaggttttgatttgttcgggaggggtgggggtagcgtgggttttgagtcgttgttgtcgtcggttttcggtttcggatcgagtttttttttcggttttttcgtatttttttgaattttttcgtcgggtttttgggttttttcgtttttttcgttttttttcgcgttcgttcgtttcgagagtaggagttaaaaggggaaggaagtgaggataggagttagggtcgcggattaggggagcgttggacgtttagggattaggatttaggcgttcgagtttttagttttattgtttttcgtttttatattcggggattttggagattacgtcgattcgtaatgaattggaataaagattttagtttttagtttttgggggaaggtaggagtagaatttgatatttttttttttaataataatacggttaaaattttcgcgggaagcgttttaggcggagagagagtcggttattttatttttacgggattattttttttattataatttacgaatgtagttgatcgaaatttcggtcgggtttttcgaagggttttcgattttcgttttttcggtagggggcggggtaggaagtagttatattcggttttagattcggtttttagaggttttcggcgtcgagatcgagattttcgtcggttcggtgtattttcgttggtggagtattttttgtttgagcgtattttatgcgttagtagtggcgttcgtttcgaacggtgtcgacggggcgttttttgagcggtttagggttattggaagggattagaggtgattggaatatttattgagtttggaaaggggttggaatgagagaatcgtttggaagtattggaatatagttttatttttatacgattagattcgttatttcgtgggtttggtcgatcgttttgattcggagatttttgagttgcgtcgtcgtttttttcgttaatatttagtagttatttgatgagcgttttttagtgggttttaggtttttatgtcggcgcggggttatagtagtggatagataggttagtttttgttttcgaggagtttatgattcgcggggagataggtatttaacgacgatttatacgattatttaaatataattgtggtgaatcgtataagagggacgcgcggcggtttgcggggaatgacgaggtcgatttcgtttgcgatttagggagggtaagggtggattaggtaaagggaatagaggattgggatttggaggtgggcgggaggcgtttggtttattggaggaaaggaatagttttgtgtgtgatgagtattgagaggaggtttggcgagtattatttagggttgaagaattaggtagtggttttagcgcggggcggtgggggggataagtgagttagggtaagaagaatggatttggttttagagtacgggttttttaaatgtaatttcggttttatagatttttgagattatgttagggggtttgtgagattttataataaaattaagatgttagtataatatcgtgtttcgtcgtcgggcgcggtggtttacgtttgtaattttagtattttgggaggtcgaggcgggtagattataaggttaggagatcgagattattttggttaatacggtgaaatttcgtttttattaaaaatataaaaagttagtcgggcgtggtggcgggtttttgtagttttagttattcgggaagttgaggtaggagaatggcgtgaattcgggaggcggagcgtgtcgtgagtcgagatcgtgttattgtattttagtttgggtaatagagcgagattttgttttagaaaaaaagaaagattatttgtagtcgggcgcggtggtttacgcgggtaattttaatattttgggaggtcgaggcgggcggattattaggttaggagatcgagattattttggttaatacggtgaaatttcgtttttattaaaaaatataaaatattagttaggtatggtggaggacgtttgtagttcgagttatttgggaggttgaggtaggagaatggcgtgaattcgagaggcggagtttgtagtgagtcgagatcgcgttattgtattttagtttgggcgatagagcgagatttcgttttaaaaaaaaaaaaaaaaaagttttttgttttttttattttataagtgtatagtggagttttttagaagttatatgatatgtattgatattatggtttttacgatgaatagaatgtgtgtttatgtattttcgtgttttaaattttttttatttttaagttttagtattataaatattgatagttataatttatatatttaaaagttttttggggtttttgatgatttttaagaggttttgagagaaaaaaattttgagaattattgttttagagttttaagaaggtgaatgttataagatgtgtgttttttaaaaaagtatttttcgggtttggtgtggtggtttacgtttgtaattttagtattttgggaggttgaggtgggtagattatttgaggttaggaatttaagattagtttggttaatatggtgaaatttcgtttttattaaaaatataaaaatttattgggtgtggtggtatgtgtttgtaattttagttatttcggaggttgaagttatagaattgtttgaatttaggaggcggaggttgtagtaagttaagattatgttattgtattgtagtttgggcggaagagtgagatttcgttttaaaaaaaaaaaaaaaagaaaaattattttttatataagtgaaagaaaaaaaaaaaagtattttagttatttagtggagagagattggagggattaggagtagatgatagggtattattttagggagttattatagaagtttgggttagagatgatggtggtttttataggatggtagtgagtgtttttattttgttttttggaagagaggaaggtggtgaggaatttaggatattaaaaggtagttgaggtgtatatggttagtttagagatatataaattattatgggtatagatgatgggagaaggatgaggttaatattttttgttttttagatattgttgagtgttgtattttttgtatttttttaaggagatatattgttttttttaatttttttaaaagtttttttaggtttcgttgtttaatatgatagttattatttatattaggttattgagtatttgatatgtggttagttcgaattgagatgtgttgattatttaaaataaatatttgtgtttgaatatttaaggtgagaaaagggttgtaatttatttttttttttttttttttttttttttttttttgagatagggttttattttgttatttaggttggagtatagtgggataattttagtttattgtagttttatttttttagatttaagcgatttttttgttatagttttttaagtagttgggattatagttgtgtgttattatgtttagttaatttgttttgttttgttttgttttgttttttgagatagagttttattttgttgtttaggttggagtgtagtggtgcgatttcggtttattgtaatttttattttttaggtttaagtaatttttttgttttagttttttgagtagttgagattataggtgtgtattattatgttcggttaatttttttgtatttttagtagagacggggttttattatgttggttaggttggttttgaatttttgattttaggtgattcgttttttttagttttttaaagtgttaggattataggcgtgaattaacgtatttggttaagattgtaattttttttttttttttttttgttgttgagacgaagttttttttttgttatttaggttggagtgtaatggtgtgattttagtttatgtaatttttgttttttaggtttaagcgatttttttgttttagtttttcgagtagttgggattataggtgtcgttatatttggttaattttttgtatttttagtagagatggggttttattatgttggttaagttggttttgaatttttgattttaggtgattttttcgtttcggttttttaaagtgtagggattataggtatgagttatcgtattcggtttgtaattttttatattgtttatatgttgtaataatattttggatgtataggttgagtatcgtcgatttaaaattttaaaatttgaaatgttttaaaatttgaaatttttttagtgttaatatgatgttataagtggaaaattttatagttgtttttatgtgatgggttatatatattattaaaaatattgtggtcgggtgtagcggtttatatttgtaattttaacgttttgggaggttaaggtagcgggcggattatttgaggtcgggagttcgagattagtttgattaatatggtgaaatttcgtttttattaaaaatataaaaattagttaggcgtggtggtgggtgtttgtaattttaattattcgggaggttaaggtaggagaatcgtttgaatttgggaggtggaggttgtagtgagtcgagatcgtattattgtattttagtttgggcgatagagattttgttttaaaaaaaaagagaaggaaaaaaatttttaggttatgtgtataaggtgtataggaaatataaatgatttttgtgtttagatttgggtttgattttaaagatattaaatatatgtaaatattttaaagtttgaaaaaatttaatatttaaaaatatttttgatttaagtattttagataagggattagaattattagattaaataaggtatattattaagttaattttatttgtttttgtttatttttttaatgtgagtattagagtatttaaatttatatatgtggtttgtattatttttttattggatagtattgtttaagtaattttttaaaatttttatatttaaggaaatatatagattaagtagtatgtttaaagagttttatagttaggatatagtgttaggttttaatttagattagtgtgaattttaagtttaggttttgtttattatattagtagtttttttttatgggttttgagataggatgaggagataaagtgataagggaaagatatagagaggtggagtattgtattttttttgaatttttgtaggtggataggtagatagttgtggggaaagattgagaagggatgggatgttggagtggtagaggtggagggtagagggatgggtgttaggtttttgggagtaggtggggaaagtttattaattttaggttatggttagggtagggttgatatttattagtttagtttagtgttttgaagagtttaagtagaagaaaggtagataggaaaaggtttacgttgtttttaagggagggttttgaaagatttggtaggtagaaggggtgagagtgagtttttgtttttttgggtgttggtttagatttcgtagagtttttagtttttatttgttatttttagggtgattttagcgttgcgtttcgaggtaggtaggttgggatggtgaattcgataggtatagcgtgttttatgttgtttagtggtgattgggggcggttgtaagtgtttagagaggttgatagagttatcggaatggtggcgtagggtcgagagttatttttgtttttcggttttttgagagcggttttttgggttatttcggagtttttattttatttttaggtttttagaagggtagaagtgggatataaggtagagtaatttcgggggtgttttttttggggcggttcgtgtaagggttgttggtattagggatattttggggggttttggggaaagaggacgaaatgagtatagggaaattagtttatattgttttttttaagagatttttagtttgtttgttggtttttttagaattaaagaaggttaggtttttttttttgaaatagggaatttattgtttttttattggtgcgttatagaaatatttatgttaaagttttttaaatttttaggaaatttttagttttttattatttttttaatttttaggaatttttttttatttttatttatttgtttaggtatttttttatttattatttttttttttattacggtttttataatttagtgtttattttttatttttggagatttttgttttttaatttattgtatatagtaagttttagggtgatttgtttttgtaggtatggtaggtgtatggtggttagataggtgtttttttgaaagggttgaattgtaggtagttagaaggttttattttcggtttatgggttttatggtttattattattttaagtagtaaatgttacggtttttttttgggttgttggtatttggttatttagtttaggagttgtagttaggagtagatgttttttatttaggtgttggcgtcgttattttagtttaaagggagggggattcggagttagagatgaggcggtttcggaggtggggggtatgtaggtaaagtttaagtttagtagagtattttgttttagttttattcgaggggtaggggtgtgggtgaggatagttagtattattgaggaagatagggagatgaggggttgggaggggtatgagggagagaaagaaggagaaaaaaatagagaaatgtagttattggggagggttaaattgtagtttatttattttttagaggatattttttttgatatttattattttttagttttttttgtaaattttttttgttttgcgattgggtggtatttagtgtggttgagggtgagtagagaggtttaggggtggtgagtaggggtaatgagggggtatggtttttgaagtttattttgaatatatagtatattttagttcgggggattgtagaattcgaggttatttttgatataatttgaattattttatttttaagtattatttttgaggaattaggttttttttgattataggcgaagataatgattgagttatgattgttagttttgtggtgttgtatagaatatttattgattttagaaggttttagttttagtttagatttgagtatagatttttatgttttattgaagtagtatagtgtagtggttaagtgtttggagtttggttgatcgggtttaaattttttttgtagtttatttatatggttttgggttattttttttttttatggtttagttttttaatttttaaaattaaaagttgatgataataatagtatttattttatgaggttgttgtgatggttaaattattaatattttttgttatttaagtttatttagtttttaattttagataatagagatatttatttatgaagggtgtttataatattgtttggaatatagtaagtttatacgtgtttgttatagttatatttaatttagtatattttaagttaatagtatttttgtaatattttttattttgttttaatgtttattttttttgtttttgatgaatgattattaagttcgttagatattaaaagtaaatttttggagttatttagatttatttatttatttagtaattattgagtattgaagatgtttaaggtattttggtagaagatagaatggtgaataagataagtagtttttgtttttaaattgtttatagtttaatgatagataagtaaattgttaaaaataatgtgttatgtgttatttttattaggatttaatagattttatatttgtttttaatttaggtttttattaatgtacgtttagataattataatagtttttttgtttggtttttttatttttagttttttttttaattttttttttatattgtagttaaataaagtgattataagtttgattttattatttatttgtttaaaaattttaaatatgggttagacgtagtggtttatgtttataattttagtattttgggaggacgaggcgggtggattatttgagttcgggagtttgaaattagtttgattaatatggtgaaatttcgtttttattaaaaatataaaattagtttggtgtggtggtatatgtttgtaattttagttattcgggagatcgaggtagtagaattgtttgaattcgggaagtagaggttgcggtgagtcgagattgtgttattgtattttagtttgggtaataagagggaaatttcgttttaaaaaaaaaaaaaaaaaaattttaaatacggttaggcgtggtggtttatatttgtaattttaatattttggtagtttgaggcgggtggattatttgaggttaggagtttaagattagtttggttaatatggtaaaattttgtttttattaaaaatataaaaattagttaggtgtgggggtaggtatttgtagttttagttatttgggaggttgaggtagaagaattatttgaatttgggaggtagaggttgtcgtaagttgaaattatgttattatattttagtttgggtaatagagtgagatttcgttttaaaattaaataaataaataaaataaaaattttaaatatttaggaagttagttgataaaggtataggttgaagttatatggtttgggtttaatttttagttttgttttttttttttttttttttttttttttttgagatagagttttgttcgttatttaggttagagtatagtggtgtgattttggtttattgtaatttttgttttttaggtttaagtgagttttttgttttagttttttgagtagttgggattataggcgtttataatcgtgtttagttaatttttgtatttttggtagagatggggttttattatgttgtttaggttggttttgaattttcgattttaggtgattcgtttgttttggttttttaaagtgttgggattataggtatgagttattacgtttggtttttagttttgttttttatatattgtgtgtttttgggtaaattatttaattggtttgtgttttatatttatttatatgtaatatagggataatattaaaatttataatttatggttgttgagaggaataagtgagattatgtatataaagtgtttagaatagggtttggtatatagaaaatatttgataaatgttagttgttattatttttattatttttattattattatggatttgttggttaatttggaaaaattatttaatttgtattttttttattagtttaaagatttgatttttgtttattttttaaaagaattaagtaaaataataggtttttttcgggtatggtggttaatatatgtaattttagtattttgggaggttgaggcgagtggattatttgaggttaggagttcgagagtagtttggttaatatggtgaaattttatttttattaaaaatataaaaaaaaaaaaaaaaaaaaattagcggggcgtggttgtgggtgtttgtgattttattaatttgggaggttgaggtaggagaattgtttgaatttaggaggtagaggttgtagtgagttaagattattttattgtattttagtatgggtgataagagtgaaatttcgttttaaaaaataaatatgtatataataaaaataggttttttagaataatacgttttttaaaagaatttttgatggttcgtttttatttatagaataaagtttagtttttaaggtatttgaatatttagtttttaatttatttttttaggttttttttgtattttataaattagttatatagaattttttttttgtgtttagtagaagtggttattattggttatttttttgttttggttatgaggtttttttagtttatattgttttttttatttttttttaaatatttattaagtttgtttaatttttagtttagggattatatgtagttaaggacggtttggaatatagttcgatataaatttataaatttttttaaaatattatgagatttttttatattttttttttttagtttattagttatcgttagtgttcgtatattttatgtatggtttaagataattttttttttagtgtggtttagggaagttaaaagattggagatttttgatttaaatattttatgtatatgaaggttatttttattgttgtttttttttagaaatgtttaggttttttaggtagaagtaatttttttttttttgtaattatttttatgttttttttaattttagtttttgaggtttataaggttaaattgtttttatttttatggaattgtttagtagagtaaaaatagtatgtaattttatttagtttgttaaaatttagaaatatatttttgaattgttaaaaaaaaaaaaaagatttataggttgggtatagtggtttacgtttgtaattttagtattttgggaggtcgaggtcggtggattatttgaggttgggagtttgagattagattggagaaatttcgtttttattaaaaatatagaattattcgggtatggtggtatacgtttgtaattatagttgtttgggaagttgaggtaggagaattatttgaatttgggaggcggaggttgtggtgagtcgagattatgttattgttttttagattgggtaataagagtaaaatttgattttaaaaaaaaaaatttatagaattaataaataaaatttggttgggtagggtggtttagatttgtaattttagtattttgggaggttgaggtgggaggattatttgaatttagtagtttgagattagtttgggtaatatagtaagattttatttttatttaaaagaaaaaatttaaaaaaataataaataagatttaaaggttttatagtttaatttttttttttttttttttttttttggagatagggttttattttgttatttattaaaggtgtaatttttttaatatagtttttcgagtagttgggattataggtatatgttacgatatttaattttttttttttttttttttttttgagatagttttacgtttgttgtttaggttggagtgtagtggtatgattttggtttattgtaattttcgttttttaggtttaagtaatttttttgttttagtttttcgagtagttgggattataggtatgtattattatgtttggttaattttgtatttttagtatagacggggtttttttatgttggttaggttggttttgaattttcgattttaggtgatttgtttatttcggttttttaaagtgttgggattataggtatgagttattgcgtttagtatttttttaatttttagtagagataaggtttggttatgttgtttaggttggttttgaatttttgagtgtaaatgatttttttatttagattttttaaagtgttggaagtataggcgtgagttattttatttgattttataatattttaaaagaatggtgagaattaaatattatatatataaagtatattaagaaagtataggtttggcgtggtggtttacgtttgtaattttagtaatttgggaggttgaggtgggtggattatttgaggttaggagtttaagattagtttggttaatatgattaaattttgtttttattaaaaatataaaaattagttgggtttggtggtgggcgtttgtagttttagttatttgggaggttgagataggagaattatttgaatttaggaggtagaagttgaaatgagtagagattatattattgtattttagtttgggtaatagggtgagattttgttttaaaaaaaaaaaaaaaaaaaaaaagtatatttggggttaggtagtttatacgtgtaattttagtagtttcggaggttaaggtgggtagattaattgagtttaggagtttaagattagtttgggtaatttgataaaaatttatttttataaaaaaaatataaaaattagttgggtatggtggtatatgtttgtggttttagttatttaggagattgaggtacgaggattatttgagttacggaggtggaggttgtagtgagttgagattatgttattgttttttagtttgtattgtattttagtttgggcgatagagggagattttgttttaaataaataaataaataagtatatttgttaataaatatttaaaaatatttgataagataagtataaatgtatattagtaaaattatgaatgattttggattttggagagattttatttttaattttatattagtataatagtttttatttttttaaatttttgattaagtagaaatgtttgaaaagaaagagtatagtaggtcgggcgtggtggtttatgtttgtaattttagtattttggaaggttaaggtgggtggattattttaggttaggagtttaagattattttggttaatatggtgaaatttgtttttaataaaaatataaaaattaggtgggcgtggtggtataagtttgtaattttagttattggggaggttaaggtataagaattgtttgaatatgggagacggaggttgtagtgagttaagattatgttattgtaattgtattttagtttgggtaataagagggagatttcgttttaaaaataaataaataaataaatagtaggtaggcgtagtggtttacgtttgtaattttagtatttcgggaggcgaggtgggaggattatttgaagttgggagttcgagattagttttattaatatggagaaattttatttttattaaaaatataaaattagttgggtgtggtggtaggtatttgtaattttagttattcgggaggttgaggtaggagaattgtttgaattagggaggcggaggtttcggtgagcgtgagattacgttattgtattttagtttgggtaataagagtaaaattttgttttaaaaataaataaataaataaaataaaaataaataaatagtatagtattttgttttgattttagttgtttgtgaaatatagataattttattattcgggtatttttagggttttttgtttgtatgttttttattttttattttatattaggattattcgtggtaaatacgtttagaattttttggagagtagagtttatattagattatttttgtgatttttaagggtatttagggttattttagagattttgatttaatcggttaagttaagtatgggattgaattaggttttagtatattttagaaatttttaatagtgtggattgagaattgttgagttttaatttatttttggtgttaaaaagtatttattgaattaatggataaattaatatagtgttattttttgatagttataataagaaaagtagttgggaaatagtatttatattttatagttggaaaaataaatttagaaagtaaagattatttttattattatttcggtggagttagtagttttaggaaatattttattttattagagagagttattgtttatataagagtagtgttttttagtttttgttagggtgggggtttgagattaagaatggaggtataggtagaggtgagggttttagcgtgggttttaagtttgtttttttggttttgtgggtaatttttaggagggtggagggaagggagggtgtagggattggttggggttgttttgtttatcgggttgtgtcgttgatataaaatttagatagaaaagttaagaattttatcggtattttatttcggaatatttcgttttcgttgttaggagggagagtttttagatatttaggttagattttttttatttttgaattatttgtatagttttttttacgttttagtttagaaaagtttttgatttttgggttttaaattgtaatgtattttttagtgtaataggagttatttaatttttagtcgcgtttattcgtttattcgagtttatttgtttgcggattatagagcggtagtatatttttatacggggttgttaggtaaggttaacgcgttagagtgtaagagtttttgttttgcggattgtcgtagcgtcgggtgtgggcgtaggtggggatagagtgttgggttttgaaagagtgattcgtaaagttgagggtgtagagtaagatatagatttgggaagagtagagaaaaaacgtttttgtttttgaattttttttatttcgtattatttgataagttttttaaggtttggtgtcgggaaattttatttttttaaagtttcgtttttcgaaatattagaaagtaatttttttgttcggttttgttttttttttattttttgttaagttgtagttttttttttgttttttttttttaattgggtgagggttagaaggagcggtagagattgatttattttagttaaattattttttttaataaaaaaaggaaattgaatttcgattggcgaaatgttttgtttaagtttataaagcgagattatcggttgatttggatttttagaatttatttatttttttttattttttttttttagttatttgttgttatggtgatgagaataggtttttgttgaggttttggttgtggtcgtaagaggttggagaggttgaggattgggttggatatgttgattattagttaagttttatttagggttcgcgggtagttttgcgcgggggttaggtcgttggtttatttcgtagaggcggggagaggtacgaagcggtttatttcgtagtgtggtgcgggggcgtttcggggatatcgtttgaaggtagtttggagggcgttcgcggggtttgagtgtagagaaggaagttgtagttgtagagttatcgtcgggaaaggggttggaagggtagcgttcggggaattttaaatgtatagattatttcgtagtgagatttattttataaaggggaagttgaggtttgaggttattgtcggatttaaagaggagggggtttcggtggaggcgatagaggtaggggggcggcgagtttttagagatttatcgtgtatattgagatagagtttagggtcgaggttcggtcggggcggcggttttttcggtttttggcgtaatagtagtgtatcgggttttttggttaggtttttttcgttcgtattttttacgaattaatattcgattatcgcgggttttgttgagacggcggtcgttaggtttggcgtatagggacgcgagtgaggagcggtttgtatgtttggtgatttgttttatttttattttggtatcggttttagtggggttattttttttcgtttttttttagtttttgggcgatgagtcgcggggttcgtttatttaaagttatagcgaggagtagagatagggattttatggcgttgcgatttttttagttatgaagttttttttttttttttttatttttatttttttttaaagggcggtatgaggggcggtggaaattttcgttttggttaggtgaaggtgtttgggggatcggtgtttttttattggttaggtagggattcgggtagattttttttagtttttattaggatattttagttttatcgcgtttttttggattatttagtagtttcgagttcgagttttttttaattttaggttttttttcgttttttaatttttgtgtgtgttttttaatatttatttgttcgaaaattattatttcggtttttttttatttgtgtcgcgtttttagtaaatatacgggttatcgggaagttaagtaaatgattaataaatattttaattattgttaaaaaaaataaaaattttgtatttttacgatttattttttttttgtttttatttatttttttatgagaatcgagttgggaatttttacgggaagtcgggggtggcggggagagatagggtagaaataaagagcgtatttttgagagggggtaggttttaggataagggtggggtttaaaggttttgtttttacgataatataaatatagattttaggtatagattataattatttgatttttgattttgtgattgtaggatgtttaatacgttttttttttttttttttatgtgtaatttattttgtggagtaggggttttagtgtatttattagagggaaaggaagggtttagttttggaaatattttgggggggaggggttgagtagtagaatgggcgggcgatggtgaaattgtggttttttttttagaatatatataagtttatagagataaaggaagatagtaagtgtggtgggagattattcgggggttatagcgtttttgtatcgtgttttttattttttttttcgaaagttattttattttagtagtttgtttttttagtttgtttttttatttttatcgaagtttatttttattttgtggattttgggtggggattagatacgtttgttggacgggggcgtggtcgtattcgtttcgtcgtcgttgttttcgtttatttcgggagatttttttttggacggtaaggatggtttcgtgggagttttaggtttaggtacggtttcgatttcgtttaggcggtgtcggcgtttatagtgttttcggtggcgtatgaagttgtttcgttatatgaattttttggcgtagatttcgtattcgtagggtttgagatttgtgtgcgtttttatgtgtttagttagatggtgttttattttgaattttttgttgtatacggggtagttaaacggtcgtagattgaggtgtatgtttacgtgtcggtttcgtatgtttttgtgggagaaggtttttttataatggtatagaaagattttattttcgtttttattgttagtttttttagggattttattaacgttattcggtatatttaggttttttatcgacgtgttttttacggttattgtttcgtgttttgtttggttttttggtggttggttaggagtttgtgaggatgaggatgaagacgacgacgggaagattaggatttggttgttttgtatgtttaagggaaggagcggtcgaggagggtgggagggggtataggaagagggagttggtttttttgagttattaagatttgttataggatttttatttttatatgggttaaagttattggaggatttatagaagttgatttgttttttttttttgtttgggggtttatttagggtacggatattatttatgttgagggtagttttaggttttttttttattggaattttggagttattttttagttttttatttttattatttttataggttaatattagattttttttttttttttttttttttagatttgggttttggggaattaggggtgttggcgttgggtaattattatttcgttttacgtatatttagtgtttttgtggtatgatgttagggggtgtgtaggtgggttttcggagtttagttttaggaattattgttttttttttatttttattattatcgtatagtttatttgtttttagtagtagttttttagatgtggtttttttattgttaacgataggggttgggaatatagggttattttttcgacgttttttattgtttattgtagaagttgtaaatgttttttgggaggaagatgagaaattagtggattttttggggttgaagtagttgttgttgttgggagattgatttttattggttcggttggaggtatgggagcgcgtagagtttatggtagtaggggttatagtgtttttattttcggatggtattttagtattagggatagtgatagaggtggttgtagtagtagtgatggtggtggtagttgaggttcggttttttcggagtagtttagtgtatttgtttataatgtgttatatttggagtatagattttattgtaaggaagttgataatgttagtagtagttatgttgaggcggttagtgtaagcggaggttaggatagttttaaaggcgtttgggtttatgatattgggtagcgagatggaggttatgtttttgagtaggatttgattatggaagtaaggggaggaggtagttaggatagttcgatgagttcggaattttcggttttgtattttgatagatatatcgtagagttggttttgtagacgttgttgattgagggattttaagagggtattggttattttagggaaggatatatgtattattgtagttgttggtaggggtagtgggggcggagttagcgatagcggtaggggaagtgttgttttattgggagatagaggagatggttttatgttgtggagggaggggatatttttttagttataggaataaagaaaggaggagggcggtcgggggggtttttgggaagaaaaagagaaaagaataatgataatattttataacgatatagttcgttataatttaaaaatatgtttacgtttattatttgtgtaattttttataatagtgaggtaggtattttttttaattttatttgatagatgaggaaattaaagtttagaaagattaagagattatttaaggttatatagtaagtggtagcgttagtaaatataggtatttgataaattttgtgttttttttttggaggttagagaaataaggtgtttttaggggttggagtggtttttttcggaattatattttattttcgatttatttgagagtttgatattttaaaatttatttttttggtgttttgtatttattttttgggagggggtagggtagttttgttattgaaaattaacgtttgttttatttttttttaggttatgttttttaagttttttcgtcgattacgttttttttcgttttagtttttttagtttcgtttttttttaggtttatttttttcgtgtttcgtttattatcgggtttttcgatttcgttttttgtttattttcgtttataacggatttcgttttttttcgtttcgttttaagcgttatttcggtttttttttttattcggaaggcgttttttaatttcgcgcgttttcgtttatcgggtcgcgcgttttcgggtttttttcgttttttattcggcggttagagtagtaatttgggtttttttcgtcgttattttgcgtcgatttttttcgtttttcgttttcgtttcgtttttcgttttttcgtttttaaaggtatagtcgggtatttcgttcgtgtcgttgggtaatattcggtcgattcggttattttgtttttaaagaaatatcgttatattttattttaaaagattaggttttttttttcgttgggagtttaggatttggttcggtcgaagtatttatttttttttaaagttataagtttgtttttttttattggcgatgggtttaggtatcgttttttaggtttcgtttttgagttgtgattattagttggttggtgggatttaatcgttttttttttagttttttatagttttattgaagtttcgtttttttttttcgggtttggattggttaaataattttgagtcggttttttattggtttttttatttttattgtacgaagtgaaaaagtaaagtgcgttaaggcggttgaagtatttaaaaaaaaaaaaaagtattgtttgaataacgtggcgaaatttcgtttttataaaaaatataaataataaaaataaaaattagttaggtatggtggtacgcgtttgtagtttcggttattcgggaggttgaggtattatcgtttgagattgggaggtttaggttgtagtgagttgtgattttattattgtattttggtttgggcgatatagcgagataaaaaaaaaaaaaaaaaaaaaaaggttaggttagaaaggatagagcgggattatttcggggatattgggttaattttgagtaaggggatagttaatgttaatttgtaatagtagaaggataagaaaaagatagtgatatagtaagaaaagaattttattgtttattaatgtttttgtgtaaaatttaagtttttttttttttttaaagaaatattattaaaaggggattagtttagtttattttttttttagttatttgttttttatttttttttaaatgttattttagaatattttggaggtagggagaaggggaggtagttaattagagtttgagagtacgatgattttttttggatcgtattgtgtggttatatttgtttgtagggaagtgagagataaagagttaaagagatttggagtataggagaaaagaaataggaggatttagaggataaaatgggtgggaaaaaggaagagataggatgtggtacgtggaatatttagatagagtagttgaaatagttaatgaaagagaataaattgttagaggaaatacgtttttttttttttattttgtaagtattaggtcgaggaggttgtgaatggggggtttgggatagtcgggttggagaagggatgtagagggagttggttattaggttatggttgggagagtttattttcgtggaggaattagtaattggggttaaggaagttaagggggaaggtgggttgggtagggtatatattttttttttattttttttatgtattgatttttgtttttttatatagttagaaatagaaatataaatatgtggaggggtacgggaagattgaggttggaggggggtagtttagttttttttagtagatttagttttttagtattgtttttcgaaagttttttgtaatttttttttggttttttttttttttttttttttgttattatttgttttttaatggttttgattttgtttgtttttttttttttcgagattttttgtaggggggattagaatttttttagttgtgaggagagacgtttttattgaaggaagtagaagagattatgtttgttttattttttaagatagtggtgaagggtttttttgattgttttttggaagaggaaatgttcgtttttatagaggaaggggtatttaggggtaaagttttaatttttagtttaaagagttgagatatagggttttttttttttagggttagttttttaggttgttttttattgtttttagtatttatgttggagggggttaggggtttttttgatagtaacgatggtgatattatgcgttttttgttttgttgtttttttgaagatttgttgatttgtttgttaggttttaggttttttttattggagatttgtagtgaggatatggggtttttgtttttatttttatttggaaaagaagaaaaggggagagggtagtttgagaatgagggggaaaaaatattgttgagaggatattaggaggaggaagggaaaggttttaaataggtggtttatgtttaataaaatagaaatgataggtgaggagaatgtttttttgatatatttgttgttgttttttttttttcgtttttttttttattatttttttgatttttttgtatttgttttagattttttttttttttagaatttgtggttttttttttttttttttttttttttttttttttttttttattattttttttatcgttttcgttatttgttttagttttggaggtagaagggtatttttgggatgttattttattagggttttgggagataaagaagtttttttaaggaattttttgttttagagggtttggtttttgtttttttttttatgtttttttattagttaatttggattttttggtggttagtgtaggggaaggataatgtttttttgaaggttgtattttatttatattttattagaatttaaggaggtttcgggggtgtttgtagagtgggaagaggtgttttggagtcgagttttttttttttttttttcgttttttttatttttgttttgtaatattgtatatttggagatgattttatttagtcgatttatggttaaatttcggttttttcgaaggcgtcgggttaatataggatttgatagtgtagggttaacgtttacgtgggaagatataaagttagagtatttagtttttgaagggattagaagagtaaaaattttagaaaggattagagagatgttttattcgttttatatttgatatataagggttattgagaggtattttattaattttttatttggtttatagttatttgtgaggtggtagttaaagttgtagatgagatcgaggtgacgtcgtttttgtaatttgatgtttatatttcggaaggtattttgagttatgagttggagttgttgtcgggggaggttaaggttgtgtcgggtagttgttttttttatagttcgaagtatatttttatagttagggaaggtattaggttttggtttgttgatgagtcgtttaatgcgtttgttaatttttgggtagcgggtgttacggtaggggatgcgttgttttatgatacggtcggttagtgaagagtagttttttagtttatatagtcgtttaaagaggcggattagtttacgttttaatcgtgttttttgtaggtatgcggagtttgggttatttaattttgagagatttaatttttttttttgtagtcgtcggatttttgttatatagagcgttagtagttgttttaaacgttggatttgtcgtcgggaattacgggtttttggagattgagaggtagtgtttttagtatttgtggggtttaaggagaggtgtgtgggagggttatttttagagggtttattggaggtggtggcggtaggggttaagtttagtttttttttggttgagtgggttttgagaatagtgtagagtttattgatgtagatatagagtttggttggtcggtttcgggttcgagataggattttagagaggatgttgtagaatttcgtcgaggttaaaaatagagagtgggtacgttgttgtcggttatagaggaatgggattattttagggtggtttgttgtttgtattttataaagtttaaggaattagaaggtttaggggaagaaggaaggggaagagagataagggagggggttgagagaaaggggaggtggggttagtgggaaagaaaggataggagaattagttagttatttttttttttggggtataataatttttttcgttaaagtttattttttcgaatagttttttattttttagtttgtagtattttttgtcgttcgaattattgttttttttggttttatgaggtttagaggagttaggggtttttgttttaggtgaggtcgtattggggagtgggtgggagggttttggttgagtagttgttttattttcgttattattatttagtacgatgatgttgttagcggtggttataggggattaaatttttcggagggaggaagtggtggggattttagaatttttgttggaaggggatggggttttagaatgagtttttttagtatagttttatttttttattttatatattttttgaattttttgggttttagtaatatttagttttgattaatattgtttttattatttgattttaataattattagttttatatgttttttggggttttttaagtggtgtggggggggggtaaattatttttatattttaagttgttattttttgttttattttttacgtcgattttcggtttttttgttgtattttttttttattttttagagttggtaagttgatttttttttttatattgtattttaaatcgttttgatatttttttgtatagataatatatttttgtgggcgttattttatgtgtttgttttttttgtttttaaataagttaattttatatttattttattttgaatgattattttaatttttagattttttgaggtgaaagaggtttttttttaatagttcgttttttttttttttttttgaattatttttatattttatttttcgatgagtttttttaaattggggttttaggttgaagatattttatttaagtttttttttttttattttattttaattttttttattttttcggtgattcgtaattgattaaaagttttttcgtatcgcgttacgttttcgcgattttttttagattttaatcgtgggttcggtcggttcgttagatgcgtttttcgttaaattttttttttttagtttagttttcggtcgttttatttttttttagggataggaaggtattatagttttttttttagatttagcgtttagttttttttaatatttttttttttatattttcgttttcgtttttgattttcgtatcgttcggtttttattttagaaatcgtttttcgaggcgattttcgtcgtaatttttagaatttcgtatggtttttttcgtttttttttttatttttatcgtaggttttattacggatcggaagttatagagttttcgtttttatgtaattaagcgtcgttatattgtcgtacggaatataggttttttgtggtcggaggtgatagtaggttcgtttcgcgaatatttttagtgcggtttatatagttagcggttttttttaggtcggagtttgttttttcgaatttaggcgttttaaagtagttgggggtcgttattttgtcgtacggtattggttacgttcggatttcggtgcgtagttagtggagttttttttattcggtgtttttacgatttcgttaattagaaattttttgtttggggtttaatcgtcggagagtagcgcgtagggaggatcgagtttcgtttttaaggaggggtaggggaatcgaatagggtggattaggaattgggttttttaaagttgtgtagagttttagggaagggtagaagttttttaaaagggaagtaaaatttttttttttagttgggttattggtaagttatttggttttgtttttttgttttttaggtttttatttttacggtttattcggttgatttagtttttttttttgtaagggcggcgcgttttttgtcgttgtttagtagttgtttttattgttaggtgttgcgtttcgcgatcgttataatatatgcgtataaatgagtataacgcgttataaaagtgttattgttattattattgttgttgatttgttttttaagttttattatagaattaatgattagttagatcgttgggatttgaatggtttttttttagagggggttttcgaagggtcgtttgtgttgattaggtggtcgtgttttgtcgtgggaggtttagggtttgcggatgggcgatgatggggtggggtttggaggagagtttgtgtaaattgtcgttgcgagggttgttgtgaggcgaaatgaggtttataaaatattttgggttttttttttttttttttcggggagaggggaaaaaagaatgaaggatgaagaaatagatttgatatttatttcgttgtgtttagggaggttggagggattcgtggaggtaaggttgggtttagaggtgagtttatgaggaaattagaaagattaatagggttttaatcgttaagatttttatttttataagtggtgggtattttgttatttaattagggttatagagtttattagatttttaacgttgagttttagaatcgtaaatattcgttcgttgaataattttatattatttttttttagtcgttaaagtttatagtttttaaaatggggaatataaaaatttttcgcgaggattgggatttggaagatgtaagggatttaattttaagaattttaatttttttaaaattggtttttttaaggaaatatttgtagtataggtttttattttttatttttttttttataatagagttatttttttaagaaaaaaaaaaaaaagaatagttttttttttttttttttttttttaaaagtatagtttttaattatgaaattttttgggggtaattttatttgtttaaaataaagggaaatgtattttgttttttttattaaggtattatgaatattatttttttttttttttttttttttttttttttttttttgttttttttttttttaaatgtagggtcggtcgggcgcgatggtttacgtttgtaattttagtattttgggggttcgaggtgggcgtattatggggttaagagatcgagattattttggttaatatggtgaaatttcgtttttattaaaaatataaaaaaattagttgggcgtggtggtaggcgtttgtagttttagttatttaggaggttgaggtaggagaatcgttcgaattcgggaggcggaggttgtagtaagtcgagatcgcgttattgtattttagtttgggcgatagagcgagattattttaaaaaaaaaaaaaaaaaaaaaaaaaaaaaggaaaaaaaaagggttttgttttattatttaggttggaatgcggtggtacggttatagtttattgtaattttaaatttttgggtttaagttatttttttattttaagtagttaggattataggcgtatattattttatttggttaatttttttaaaaaaagttttttgtggaggttgggcgcggtggtttatgtttgtaattttagaattttgggaggtcgaggcgggcggattatttgaggtcggaagtttgagattagtttggttaatatggtgaaatttcgtttttattaaaaatataaaaattatttgggtttggtggtacgcgtttgtagttttagttattcgggaggttgaggtaggagaatcgtttgaattcgggaggcggaggtcgtagtgagttgagattagttattgtattttagtttggcgatagagtaagattttgttttaaaaaaaaaaaaaaaaaggttttttatagcgatagggttttattgtgttgtttagatggattttgagttttttgttttaagtaatttttttattttagcgttttaaagtgttgggattatgggcgtgaatcgttatttttagattattattttattaaatatttttttttaatagttataaaaatgtttacgatcggttaggtacggtggtttacgtttgtaattttagtattttgggaggtcgaggtaggaggattacgagggtaggaaatcgagattattttggttaatacggtgaaattttgtttttattaaaaatattaaaaaaaaaaaaaaaaaaaaattagttgggcgtggtggtgggcgttttgtagatttagttatttcggaggttgaggtaggagaatggcgtgaattcgggaggcggagtttgtagtgagtcgagatcgcgttattgttttttagtttgggcgatagagcgagatttcgttttaaaaaaaaaaaaaaaagtgtacgattatatgtttataagaatattttgtttttataataattgtaatagtaatttttttagaataatttttaataattagagttttataattataagaaagatattttttattttaattaatatatatgtatatgtaggaagatgtaaaagattggttaataaaggatttttaagtataaaagtataaagtttgtggggaagtggagtagtagtaggagtttaaggaaaaaagaggtgatgaaagaaaaaaggaatgatttttaattggtaagaattaatttatattttttttttttttttgagatggagttttgttttgtcgtttaggttggagtttaatggtataatttttgtttattgtaattttttattttcgggtttaagcgatttttttgttttaattttttgagtagttgggattataggtatataatattatgtttagttaattttttgtattttttgtattttttttttttagtggatatgggtttttggtatgttggttaggttggttttaaatttttgatttcgtgatttatttaatttagttttttaaagtgttgggattataggcgtgaagtatcgtgttcggttattattatgatattttaattttattggataataaatggtgatttaattgttttattttaaaatgtggggttaggtatggtgatttatgtttgtaattttattattttgggaggtcgaggcgggtagattatttgaggttaggagttcgagattagtttgattaatatgaggaaatttcgtttttattagagatataaaaaatagttaggcgtggtcgtgggcgtttgtaattttagttatttgggagttgaggtaggggaattttttgaatttgggaggtaaaagttgtagtgagttaagattacgttattgtattttagtttgggcgatagagtaagattttgttttaaaaaataaaaaaataggtcgggcgtggtggtttaaatttgtaattttagtattttgggaggtcgaggtaggtagattatttgaggttaggagttcgagattagtttgtttaatatgatgaaatttcgtttttattaaaattataaaaaaattagttgggtgtagtggcgggcgtttgtagttttagttatttgggaggttgaggtaggagaatcgtttgaattcgggaggtagaggttgtcggaagttaagatcgtattattatattttagtatgggtaatatagagagattgtgttttaaaaaaataaataaataggttaggtgtagtggtttatgttgtaattttagtattttgggaggtcgaggtaggtagattacgaagtttaggagttcgagattagtttggttaatatggtgatattttcgtttttattaaaaatataaaaattagttgggcgtggtggttcgcgtttttagttttagttatttgggaagttgaggtagaagaatcgtttgaatttaggaggcggagattttagtgagttaagatggtgttattgtattttagtttgggtgatagagtaagattttgttttaaaaaataaataaataaaataaaatgtggttagttgtggtttatcgtttataattttagtattttgggaagttgaggtgggtggattgtttgattttaggattatagattagtttaggtaatatagtgagattttattttaataaattaataaataggttgggcgtagtggtttatgtttgtaattttagtattttgggaggttgaggtgggcggattatttgaggttaggagttttagattagttttgttaatatgatgaaattttgtttttattaaaaatataaaaattagttgggtacggtggtatatatttgtagttttagttatttgggggtttgaggtaggagaatcgttagaatttgggaagtggaggtaggttgtagtgagtagagattattgttattgtattttagtttgggtaataggagattttgttataaaaaaaaaaaaaaaaaaaagagtttaagattagcgtggttaatatggtgaaatttttatttttattaaaaatataaaaattaggggtgttggtgtatatttgtggttttagttatttaggaggttgtggtaggagaattgtttgaattttagaggtagaggttgtagtgagtcgagattgtattattgtattgtagtttgggcgatagagtaagattttattttaaaaaaaaaataaaaattaaaaaataaataaaatgtgaatatttttaatatgttagaattatatttttgaaataatttttatttatttatttttatttttatttatttatttatttatttttggaaggagtttcgttttgttatttaggtcggagtgtaatggtgcgatttcggtttattgtaattgtttttcgggtttaagtaatttttttgttttagtttttgagtagttgaggtagagaattaggtgtttattaattttttcggttaatttttgtatttttagtagatatggggttttattatatttgttagattggttttgaatttttgattttaggtgatttttttgttttggttttttaaatttttgggattataggtatgagttattgtgttcggttataattttaatttatgatgaaaatttttagatatttatttaaagatatatgaaggagtatatatttttttaaaattatttttttgagtataggtgtagaatttaagattgttgttttggtcgggcgtagtggtttatatttgtaattttagcgttttgggaggttaaggtaggtagatatttgaggtcggagttggagatttgtttgattaatatggagaaattttgtttttattaaaaatataaaattagtagggggcggtggcgtatgtttgtaattttagttatttaggaggttgaggtaggagaattttttgaattttggaggtagaggttgtagtgagttaagattgtgttattgtattttagtttaggtaataagagtaaaattttattttaaaaaaaaaaaaaaaaaaaaaaagattgttgttttaagttatttaagtattttttttatagtttttaatatttttattttttttttgtttttttttttatttttttggtggggaaagaagatgtttataggaaaggtggttataattttagttttttttttttttgaggtgtttttaggagttagttttttaattttgtttatagtagtaattatagtagtttataagtagtttttagtattagtagtgttaggaagagggttaggaagataaagaaagttttgtttaaggtacgtcgtacgggatttttgggaggggagggattttgggtaaatgttaggaatatattcgtttcgtttatattatttttttttgttattttgatttatagttagatagttggttggattagggggttgggatgtaaggttttgtttagtattgttaggattaaggagtatggttgtggtaagttttgtatttgttagttttgattttaatttttatatttaagagaaaagagaaaggattttatgagtttttagattaattatttaaatatttagtgtgatgtgaaaggtttggattaaatgatttatgaattttatttagtttttttatagtataattttgtgatttggaaattgaaggtttaatatgaaggtataagttagaattgtttgttattttgggttttaagttttaaagatttaaggtttaaaattttgggttttaattgatagagagtgaggaaatggatttattatgtatttgtgagttatggttagttaaggatttaaagttttttttggttggatggtagggggtgagatggtttattttaattaaggcgggtaggaataagtagaggggatttgagtttttataggagtagttttttttattgggtttgtaggtagttaagtttgagatggtataatttagaatattttttttttaatttttggtttttgtagtattaagggaggattattattgattgtatgagtttaaggggaggtttataaaaagataaagatcgtgatggattagtagggtaagggtatgtgattgggatttggttgttgggttggggttattttattttattttatttatttatttatagacggagtttcgttttgttttttaggttggagtgtagtggtacgatttcggtttattgtaatttttgttttttgggtttaagaaattttttttttttaattttttaagtagttgggattataggtatgtgttattatgttcggttaatttttttgtatttttagtagagacggggttttattatgttggttaagttggtttggaatttttgattttaaatgatttatttattttggttttttaaagtgttgagattataggtgtgagttattgtatttagttagggtaattttaaagaagagtgaagttttgttatcgatggtttaggttttagaggttattagtggaggatgtggttgaggaggttgtaggagtaaggattgaagattttttttttttttttttttttttttttttttttgattgattgaagatttttttttaggttaggcgtggtggtttacgtttgtaattttagtattttgggagttcgaggcggatggattaattgaggttaggagattaagattagtttggttaatatggtgaaatattgtttttatttaaaatataaaaattattcgggagtggtggcgtatgtttgtaattttagttattcgggaagttgatgtaggagaattttttgaaattgggaggcggaggttgttatgagttaagattatgttattgtaattgtattttaatttgggtgatagagtgagatttcgttttaaaaaaataaaaataaaaaaagaagatgttttattgattttgttttttaggtattggtttgaaggttgggtaatgaaattgaagtttatttggaaataagggattcgtttaagtgaggttgagggaggggagggggaacggtggaggaagtagtgtgtgtagtagtgaattttatattgggaatttttggagttttttatttaaattattttatttttatttttattttaataggaagattttgttttttttttttttttttttaatcggattttttttttttttgagatggagtttcgttttgtttttcgggttggggtgtaatggtacgatttcggtttattgtaattttcgtttttcgggtttaaattatttttttgttttagttttttaagtcgttggaattataggtacgtgttattacgtttggttaattttttgtatttttagtagagacggggttttatagtgtaggttaggttggtttcgaatttttgatttcgtgatttatttattttagttttttaaagtgttgggattataggtataagttatcgtattcgggttataggattttgttttgttatttaggttggagtgtagtggtttaaacgtggtttattgtagttttgatttttttagtttaagtaatttttttattttagttttttgagtagttgggattataggtgtgtgttattacgtttggtttatttttgaattttgtagagatagggtttttttatgttatttaggttggtttttaatttttgagtttattaaataatttttttattttagttttttattattttggaattataagtataagttattatgtttaagaatattttttttatttgggaagttaggttattttttaaaagagtagaaatgatgttataatgttgttttgagggttgggcgcggtggtttacgtttgtaattttagtattttgggaggtcgaggtgggcggattataaggttaggagattgaggttattttggtaaatacggtgaaatttcgtttttattaaaaatataaaaaattaggttaggcgcggtggtttacgtttgtaattttagtattttgggaggtcgaggcggatagattacgaggttaggagatcgagattattttggttaatacggtgaaatttcgtttttattaaaaatataaaaaattagttaggtgtgatggcgggtgtttgtagttttagttatttgggaggttgaggtaggagaattatttgaattcgggaggtagagtttgtagtgagttaagattatgttattgtattttagattgggcgatatagtgagatttcgttttaaaaaaaaaaaaaaaatataaaaaattagtcggttgtggtggcgggagtttgtagttttaattattcgggaggttgaggtaggagaatggtatgaattttagaggcggagtttgtagtgagtcgagattgttttattgtattttagtttgggcgatagagcgagattttgttttaaaaaaaaaatgttgttttaagttatgtcgtattgttttttgttgtagttgtaaaggagtttcgaaaaagtgaaaaaattttggattagaatttaaattgattatttagttgtgtgaagttgtggataagttatatgatttttttttagtgttttgttttgtaataaaattagaaaaagtttttgttttttagaattattttgagagataaatgaaataaaggttttttgatgttgttggttttttgtaaattataaagtattatgtaaatgtaatatattaatttgatatttttatttatattttaggtaagtgtgtaataaggttatataaatatttttattgtttttttatatggtaggtttagtattaatattttgtgtaataaataaatttagtattttgttggaatttttttaattttgaaataatttttagtttatagaaaaatttaagaatagttttaagaattttggtatgtattttttttatttagattttttatttgttaatatttggttgtatttgttttatttcgtttttaattttagtataattatgtgttataggttgaattgtgttttttaaaaatttatatgttgtgtagttataaaaatgaataagggttgggttgggcgtagtgttttatgtttgtaattttagtattttgggagatcgaggcgggtagattataagtttaagagatcgagattattttggttaatatattgaaagtttatttttattaaaaatataaaaaattagtcgggtgtggtggtgggcgtttgtagttttagttatttaggaggttgaggtaggggaatggtttgaattcgggaggcggaggttgtggagagttgagatcgtattattgtattttagtttggtaatagagtgagttgttgttaaaaaaaaaaagaaaaaagaataagattaggttaggcgcggtggtttatgtttgtaattttagaattttgagaggttaaggtgggtagattataaggttaggagtttgagattagtttggttaatatggtaaaaatttatatttattaaaaatataaaaattagttgggtatggtggtaggtttttataattttagttagtgatatgggaggttgaggtaggagaattatttgaatttagggggtcgaggttgtagtaagttgtgattttattattgtattttagttttattgatagtacgagattttttttaaaaaaaaaaaaaaaaaaaaaaaggtgaagaatttatttgttcgtatgtttttatttataagtgatgatgagaatatacggatatacggtgggaaataatataattgggttttgtttgggggagtgggggaaggaagggtattaggaagaatagttaatggatgttgggtttaatatttgggtgatgggatgatttgtgtagtaaattattattgtatacgtttatttatgtaataaatttatatatcgtatatatgtatttttgaatttaaaataaaagtcgaaggaaaaaaataaaatttatataatgaagttttaatttttagttttttagaatgtaattttatttggaaataaggttgttgtatatgtaattggtttaatgaggttatattggagttgagtgggttttttattttttttataagaaaggaagtttggatataggtttgcggatagagagaatgatatgtgattatgaaggtagagattaggttgatatgttaaagattgttagtaggttaggtattatggtttatgtttgtaattttagtattttgggaggttaatataggtggattatttgaggttaggagttcgagattagtttggttaatatagtgaaattttatttttattaaaaatataaaaaattggtcgagtataatggtttacgtttgtaattttagtattttgggaggttgaggcgggtagattacgaggttaggagtttaagattagtttggttaatatggtgaaattttgtttttattaaaaatataaaaattggtagggtatggttatgggtatttgtaattttagttattttggaggtaggagaattgtttgaatttggaggcggaggttgtagtgagttgagatcgtgttattgtattttagtttgggcgatagagcgagattttgttttagaaaaaaaaaaaaaaaaaaaatataaaatgttagtcgggcgtggtcgtgggtgtttgtaattttagttatttaatcgggaggttgaggtaggaaaattgtttgaatttgggaggtagaggttgtattgagtcgagattttgttattgtattttagtttgggtgatagagtaagatttcgttttaaaatatatatatatatatatatatatatatataaaagattgttagtaaattatcggaaattagtagaaaggtttggaatagatttttttttatattttttagaaagaattaattttgtttatattttgattttagatttttagtttttagaattgtaaggtaatatatttttgttgtttaagttttttagtttgtgatattttgttatggtagttttagtaaattaaaatattattttaattaggaaattaatattattttttaatttatagattttatttagattttattagttgttttagtaatgatcgtttttttttttttaaattattttttttttttttttttttttggagataggtttgttatttaggttggagtgtagtggtgcgatttcggtgtattataatttttatttttcgggtttaaataatttttttgttttagttttttaagtagttgggattataggtatacgtcgttatagttagttaattttttgtattttagtagagacggggtttcgttatgttgtttaggttggttttgaatttttgagtttaggtaatttattcgtttaggttttttaaagtgtaattatttttttttttaatagttgtttttttttttttttttttttttttttttgagatgaggttttattttgttgtttaggttaaagtgtagtggtgttattaagagtttattgtagttttaaatttttgggtttaagtgatttttttatttgagttttttaaagtgttgggattatagatgcgtgttattatatttggtttatttgttttttttagtttaggattatatattgtatttgattgttatatatttatttgtagttttttttaatttgggaagtttttagtttttttttgttttttatgaatttgatagttttgaagaggttttttattttttttttttttttttttttttttttttttttttttaaataggtttttgttttgtcgtttaggttagagtgtagtagtaggattatagtttattgtagttttaaatttttcggtttaagtaatttttttattttagtattttgagtagttgcggttataggtgtgtgttagtatattcggggaatttaaatattatttgtaggttgggtatagtggtttatgtttgtaattttagtattttgggatgtcgaggtaggtagattataaggttaggagtttgagattagtttggttagcgtggtgaaattttatttttattaaaattttaaaaaattagttaggtatggtggtatatgtttgtaattttagttagttatataggaggttgaggtaggagaattgcgtgaaatcgggaggtagaggttatagtgagtcgagattgtgttaatatgttttattttgggagttagagtaaaattttattataagaaaaaaaaaaaaaaaagataggattttttatttgttagtttttttattgttggttttgatgatgtaagatgttatattggagaaatttatatggtaagaaattaggtgtggtttttaaatattaattaatagggaattgagatttttagttaaaaaattttttagaaattgaattttgtaaatagttatgtgagtgagtttagaagtagaattttttttagttaagttttatttttatttttatttttatttttattttttttgagatagagttttgtttcgttatttaggttagagtgtaatgtgttatttcgttttattgtaatttttattttttaggtttaatcgatttttttgttttagttttttaagtagttgggattataggtgttcgttataatatttagttaatttttgtatttttagtagaaatcgggttttattaggtgggttaggttggtttggaatttttgattttaggtgatgtatttgttttagttttttaaagtgttgggattatatgtatgagttattgagttcggttttgagtttttagatgagattataggtaatttatagattgtagttttatgagagttttcgaagtagaggatttagttaagttgtttttagattttttttttatagaagttattagataatagtgtgttgttttgagttatcgggttttggggtaatttgttatatagtaatagataatttatatattgtgttagaattgagtattagatttttagtaatagatatatttatatattttttttaaatttatttttttaatatttatgatatgtggggttttttgaaatgtggggttttaggtaggatttttttttgtttggatataagagtagtattagaattagtttattagtttttatatttttttgtttgtatgttttttaaaaatattttggaaaattatgtgttattttgtatatatttttatttggtatttaatttttttttttgttgatttaaataattgtaaagagtataataaatcggtttggtgtaatggtttatatttgtaattttagtattttgggaggtcgaggtaggtggataacgaggttaggagtttaagattagtttggttaatatagtgaaattttgtttgtattaaaaatataaaaattagttgggtatggtggcgtatgtttgtaattttagttattcgggaggttgaagtataagaattgtttgaatttgggaggcggtggttgtagtgagtcgatattatattattgtattttagtttgggtaatagagcgagattttattttagaaaaaaaaaaagagtgtaatagattttgtgttttatataaatattgatattgtaaaataaaattgttaattgggtacggtggtttacgtttgtaattttagtattttgggaggtcgaggtaggcggattacgaggttaagggatcgagattagtttggttaatatggtgaaattttatttttattaaaaatataaaaattagttgggcgtggtggtacgcgtttgtagttttagttaatgaggaggttgaggtaggagaatagtttgaatttaggaggaggaggttgtagtgagttaagattatattattgtattttagtttggttgatagagttaaattttattttaaaaaaataaaaataggttgggtgcggtggtttacgtttgtaattatagtattatgggaggtcgagataggcggattacgaggttaggagatcgagataattttgattaatacggtgaaatttcgtttttattaaaaatataaaaaaattagtcgggtatagtggcgggcgtttgtagttttagttattcgggaggttgaggtagaatggcgtgaatttgggaggcggagtttgtagtgagttaagatcgcgttattgtattttagtttgggtaatagagttaggttttattttaaaaaaataaataaaataaaaataataaaaaaaaataaaaaattgtttggttgggtgtagtggtttacgtttgtaattttagtattttgggaggttgaggtgagtggattatttgaggttaggagtttagattaatttggttaatatagtgaaattttgtttttattaaaaatataaaaattagttaggtatggtggtatatgtttgtaattttagttattttcgggtttaagtaatttttgtgttttagttttttaagtagatgggattataggtgtgtattattatatatttggttaatatttttgtatttttagtagagatggggttttattatgttggttaggttggtttggaatttttgattttaggtaatttgttcgttttagttttttaaaatgttgggattataggtatgagttattatatttggttataaaataaataaggaaataaataaatatatatatgtaaaatatatatatgtaatatatgtaaaatatatatgttatatatgtaaatatatatatatatatatatatatagtttgtttgtttttgagatggagttttgtttttgttgtttaggttggagtgtaatggtacgattttggtttattgtaattttcgtttttcgggtttaagcgatttttttgttttagttttttgagtagttgggaatataggtatgtattattacgtttggataattttttatttttagtagagattgggtttttttatattggttaggttggtttcgaatttttgattttaggtgatttatttatttcggttttttaaagtgttgagattataggtgtgagttattgtatttagttcgttttgttttaaatatgagtgtttagttaaggaatattagatatttgaggaagattttagatatgagtaaaaatttaaaattaaaagtaaaaacgatatagtattgtgtttttcgtttttttttatcgtttggcgtagggtagtttatttttggtgtttggcgttggaattaaataattattatgtggagtaaaaaggtaagattaagattattaaaaagtttttttagcgtataatatttaacgtgtttgttatgtttgattagttatagatttaggagtttaaagaggtttttaatatgattgattagaatagagatggttttattaataaagaagatttgtatgatatgtttgtttttttagggaagaattttatcgatgtatattttgatgttataatgaatgaggtattagggtttatcgattttattatgttttttattatatttggtgagaagttaaatggtatagattttgaagatgttattggaaatgtttttgtttgttttgatgaagaagtaataggtattatttaggaagattatttgagagagttgttgataattatgtgggatcggtttacggatgaggaagtggatgagttgtatagagaagcgtttattaataaaaaggggaattttaattatatcgagtttatatgtattttgaaatatggagtaaaagataaagacgattgaaaagaattttagttaaaattttttaattatattgttttattttgttttattttttagatattttttttatttttatagaatttgttgtatgtaatttagttttatagttttgttttttttttttttttatgtatttattttagatttttttgttatatagtatttgtataattagattgaaaatggggatgagggtgtaaattgtattgaaaaagagattatggtcgggcgtagtggtttacgtttgtaattttagtaatttgggaggtcgaggcgggtggataatttgaggttaggcgtttaagattacgttgattaatatggtgaaatttcgtttttattaaaaatataaaaagttagttgggcgtggtggcgggtatttgtaattttagttatttaggaggttgaggtaggagaatcgtttgaatttaggaggtagaagttgtagtgaattaagattatatcgttgtattttagtttgggtaataagagtaaaatttagttaaaaaaaaaaaaaagaaagaaagaaaagaaaagaaggttaggtacggtggtttacgtttgtaattttagtattttgggaggttgaggcgggtggattacgaggttaggagatcgagattattttggttaatacggtgaaatttcgtttttattaaaaatataaaaatattagttaggtatggtggtgggtttttgttgttttagttattcgggaggttgaggtaggagaatggtatgaagttaggaggtagagtttgtagtgagtcgagattgagttattgtatttcggtttgggcgatagagtgagatttcgttttaaaaaaaaaaaaaaagaaaagaagaaaaagaaaaagtgatagtaaataaaaattaataaatgtgaaaaaaaaaaagtaaaaataaatatggaggaaagagatagaagaggaaaattttatataaattataataaatttttatattgatgagagaaaatgagtattagaagaagaagaagagttgtaagattaataggatatgagaaatgaaaatttgagttaggtgtagtggtttatatttgtaattttagtattttgggaggttgaggtagttagattatttgaggttaggagtttaagattagtttggttaatatggtgaaattttgtttttattaaaaatacgaaaattagtcgggtgtggttatgggtgtttgtaattttagttatgtaggaggttgaggtaggagaatcgtttgagtttgggaggcggtggttgtagtgagtcgagatcgtattattgtattttagtttgggtgatagagtgagattttattttaaaaaaaaaaaagaagaaaaaagaaaaaaaaatttgaatttaattataagatttagattttggttaggtgcggtagtttatgtttgtaattttaatatttaagaggttgaggtaggaggattgtttgagtttagatatttgagattaatttgggtaatatagggagatttgtttttataaataatttaaaaattaataggtagggcgtagtggtttatgtttgtaattttagtattttgggaggttagggtaggtagattatgtgaggttaggagttcgagattagtatgattaaaatggtgaaattttatttttattaaaaatataaaaaaaaattagcggggtatggtggttcgtatttgtaattttagttatttgggaggttgagataggggaattatttgaatttagtaggtggaagttgtagtgagttaagatcgtattattgtattttagtttgtgtgatagaaagattttgttttaagaggaaaaaaaaaaatattagttagggtcggtcgcggtggtttatgtttgtatttttagtattttgggattttaaggtgggtagattatttgaggttaggaattcgagattagtttgattaatatgatgaaatttcgtttttattaaaaatataaaaaaattagttgggtgtggtggtgtatgtttgtaattttagttattcgtgaggttaaggtaggagaattgtttgaatttcggagattttgtagtgagttaagattgggttatttgtattttagtttgggtgataaagtaagatttttttttaaaaaaaagaaatttatggtcgggcgtagtggtttacgtttgtaattttagtattttgggaggtcgagatgggtggattacgaggttaggagatttagattatttcggttaatatggtgaaattttatttttattaaaaatataaaaaattagttaggtatggtggcgggtatttttagttttagttatttgggaggttgaggtaagagaatggtgtgaattcgggaggcggagtttgtagtgagtcgagattgtgttattgtattttagtttggataatagggagagattttgttaaaaaaaaaaaaaaaaaaagaaattttaaaaaagaaagaaaaatggttaggtatagtggtttatgtttgtaattttagtagtttgggaggttgaggtgggtatattaatttaggttaggagttcgagattagtatgattaatatggtgaattttgtttttattaaaaatataaaattagtttgatgtagtggtatatgtttttagttttagttatttaggaggttgagataggagaattatttgataggaggtagaggttttggtgagttgagattatattattgtattttaatttgggtaataagagtgaaattttagtttaaaaaaaaaaggaaaaaaaaagaaaaaaaaaaaattacggtagcgtgtatttgtgtttttagttatttaggaggttgaggtaggaggattatttgatttggaggttaaggttgtagtgagttatgattatattattgtattttagtttgggtaatatagtgagattttgttacgaagtttgtagtgtagtgacgagattttggtttattgtaatttttgtattttaggtttaaatgattttttgttttagttttttaagtagttgggatttattggtatttgttattatgtttggttagtttttgaatttttttagtagagatagtgttttgttatgttggttaggttggtttgtatttaattttgtatttatatttttggttttttttttttttttgagacggagtttcgttttgttgttttggttggagtgtagtggcgtgattttagtttattgtaattttcgttttttgggtttaagcgatttttttgttttagttttttgagtaattgggattataggtatttattatcgtgtttggttaatttttatatttttttttagtaaagatggggtttggttatgttggttaagttggttttaaatttttgattttaggtgatttgtttatttcggttttttaaagtgttgggatatttttggtatttttttttttaaaataggtatttaaaattgtatacgtgttagttttttattaatttatatttgttgtatttgtagagatagagtttatatatataagtatgtattaatatatataagtgtatatgtataaatgtatatatatatataaatatatgattattatttttttttttgtttttttttatttaatattttgaaattaaatagagaggtgtttttttttttttttttttcggagtcggagttttgttttgttgtttaggttggagtgtagtggtttaatttcggtttattgtaatttttattttataggtttaagttttttttttgttttagttttttaagtaatttggattataggcgtatattattatgtttggttaatttttgtatttttagtagagatggggttttattatattggttaggttggtttcgaatttttgattttatgatttttttgatttggttttttaaagtgttgagattataggtttgagttattacgtttagtttttttttttttttttttttttaaatttaatttaatggagatgagtttttttaatatgttatttagagtagttttaaatttttgggtttaagtgatttatttattttggttttttaaagtgttgggattataggagtgagttatcgtattcgattttttgtttgttatagtgtttttttgatttttaaaaatgtttagtgtaggttaggcgtggtggtttatatttataattttagtattttgggaggttaaggtaggtggattatttgaggttaggagtttaagatttgtcgggttaatatggtaaaattttgtttataaaaaatataaaaattagttgtgcgtggtggtgcgtatttgtaattttagttatttaggaggttgattgaggtaggaagattgtttgaatttgggaggtagaggcggaggttgtagtgagttgagattgtgttatcgtattttagagtaagattttattttaaaaaaaaaatgtttagtgtaaatgtatgttttttgaagtagaattgttaggttaaagaatacgtaaatatttgatttgggtagatatttttaaaatgttttttgtagaagtcgtattagtgtatttttttttttgtcggtaatgtgtgatagtattagttttttttttttattttattagttgagtgtgttattaaatttttttttttttttttttttttgagatagagtttttttttatcgtttagtttggagtgtagtggtatgatttcggtttaatgtaatttttattttttaggtttaagttatttttatgttttagttaatagttgtgattataggtgtatgttattatcggttgatttttgtatttttagtagagatagggttttgttatgtttttttgtttgttttgagataggatttttttttgttgtttaggttagagtgtagtggtatgaatatggatggtttattgtagtttcgattttttgggtttaagtgatttttttgttttagttttttaagtagttgggattttaggtgggagttattatgtttttttaaattttattttttggtgagagtgattagttattaaggtatattgtaaaggttttagataataggaagtggtagagaattgcggttaatttaatatttagataaatttaaggtgggatttattaggtattatgtttgttatttgggtgattaaattatttgtatattaaagttttatgatatatattttatttatataaggaatttatatatgtatttttgaatttaaagtaaaagttaaaaaataaaataatataatttaaagtttgggttatagagtataagtgagagatatttagttattgggagtttataaaagatatataaatatcgtataagagtaaaagttaatttgaatatttattatagttagaggaaattaaaattatttttagtgtatggtcgttaggtaaagtattttgttttttttattttttttgtttttggttgtgagggagagggtggagagttagatataggaaggtaagaaagaaatttttgaggaagttagttattttgttagttttatattggtagttttttatgttaaattatttagtcggagttggtcgagagaaaaaacgtaatttagaatgatgtttggaggattttttttttttgttttaaggattgagtaggtatgttttgtggtttgtttgagttattttttatgggtaatggaagaattagttttatataatatatttaaaggggtggggatatttgagtgtggggggtgtatagtaatatatttaagtttatgtatatggtatttgaggtcggggtatggaagaatattgaggtattgtgtgtatgttatttgtgcgtgagaatgaaattttttgattttgaaaataggatagggagtggagtgtgtggtgtgataaggaacgttgaaaatagttttttgagaatgcggtttgagtgtttttacgaggtcgtaggtgttttacgattcgattttaaaaagttatttagtggatgtttgtggtttaataagtatttttaataaatatttggtagacggatgttggggcgggtttttttagaagaaatgttttttttattttttcggttttatttagttggaattgtttaagaatttatttttggcgtttattgtaagttataaattttgtaagtggtgtattcgacgtgatcgttttgaagttatgcgtgaaaggaggagagtttattaatttttagaaaatttcggtaagggatagttttgattattattaggtggataggatttacgcgaaaaatattaggggttcggttattatgggttaggaaatgaataaagaataattttttttttttttgagatggagttttattttgtcgtttaggttggagtgtagtagcgtgatttcggtttattgtaatttttatttttttggtttaagttatttttttgttttagttttttgaatagttgggattataggtgtacgttattttataataggatttaattaattttgtttttaaggtgtataataatagagaaaagttataattatttgtttttgttgtgagataaaatttagttgtatttttagtatacgagaattttaaaatgtttaagtcgtatatgtttaaatcgtagtggttaagtatttttataggattttttttattaggattttgttttaagtgttagaaatttggttattgggttaagaaatgtttatagttcgggattttttttaagtcgtgttttatttgtgtaggattttattgaaaattagattgttttattcgtttcgtagttatttttagagttttgggatttttggtttaagattttttgattgatttttttttagatttttttagtttagcggttgaagattgatgttgttcgattattttcgaagtttttcgggttattacggatattttgggtaatttttatagtggagggtaagttattttttttaattaatatggaggttattaattttatattattttttttttaaaggtttattttttttgtttttataattgttgtgggtatttatggttaggtttttaaattttttaaaattttttaattttggtgttaatttggataatatttttttatgtatttttttttagttatttttatttgtttagtttttttattaggtcgagatattttaattaaattatttgtttttttgattaattttaggttatagttatatttcgttgttgtttttttttttagtttaaagttttttttacgttttttttttttatttttttattttaatttataggtatgggatatttttattttttttttggtgaattatttacgtttattattattttattaaaatttaattatttttatttcgtttaatgttagtattttattttatagtatgttttaaaaggattaaattttgttattatttatttgttatagtatggttttttaaagtttataaattttttttataatttttttattttatttgtttaaaaattagataagttttataggttagtttaggatttgcgttatatcgattaaattgttttgtttatttattttgtggtgttaaatttatatatttttttatttttaatatttttttttataatttattattttgttttagataaatttagttgattttatagattttaaattttttttttttttttttttttattttttaaaatatagtttttatattagttttttatgatttatttcgattttttttattatatatagtcgaagtgtagggttgtatagttagaatttttatataaggattaggatcgtattttgtagtttttttgtttaaataatttgatttattgttttaggttggttattatgttttcgtgtagtgtttgttattgttttaatatttttataggtttttaaaattataaattatgtttaatttattttttacggtttttataaatttatttttttttttatatttaatacgtatattttttgtttttcggtttttttagttgtatttattttttgttgagttttttatagttattattgtttttggttaggattttaatttagttttttatattatttttgatattatatttgatttttatgattgtatttttttgatttatttgatatttattttattttttcgtattttttttttttttgttttttattttgattatatttggtttattgatggtagttttattaggtttaattgttatatattagtaaaggtaggttatgttatagtattttttatatttattattgaggttattgttttgtttttttttattatttttcggtaagttgaatttattgttttaattcgagtttttatttttgtaaagggattatatgttaatatttatataattttaaatatgttttttatattttgtattattatattgttatatgggtaaaaagaggtttttttattacgtaagggttttttgttattaatgtttttttaataaaaattttttttaaggtcgttttatttttaaaggaagttggagttatttattttaagggttattaaaaggcgttagattttatcgtttagggtaatgtttttgttgataaggtagttaaagaagtagttagtattttaaattttgttttttacggttaattttttttatttttatgggttatttttatttatttttttgttgaaatttttatttattagtttttttttatataaggtaaatggtttttggattaaggaaaatattttttaatagttttataggtttattttattttgttgttattttataattttttttatgtaagttataagttgttagtttattttttagaattttttattttttttttatcgtggaaatttatttttaaggaaattattttttagtgttttatttgttattttattattttttagggagtgtttaggtttttttttttttttatatattaagtttagggatttgtttttgtttaggattggtaaattgattttatttatatgttttaagttaggaaattaaaatattttttggtttgggtagatatttttattggatgggtagaggtttttttaatagggtttgagaaggttattgcggttatttttttttttttgttagatataatttttcgttttggtttttttatttttatatagtttaataatagattggtttttattagttaaattatttaagtagttttttaggtttttggtatttagtggaatttttatattttttattatttttaatttttagaaaaagtaaaatagattaatagttttttaaagatatattttattaagtttagtttttaatttaaaaagattggatagtatttttattatttgttttttttagaattcgggtttgttttcggaatgttgtaggatatagtttatttgagtttttgtatggatgtttttttttattaggttttagttttattttagatattagtttaattcggattgtattttaaaaatttgttattttttttattttttgtttagttatatttttatttattatttttaattatttataaatgttttgtttttgtttatattgtcggtttatattgtttttttaagtcgttatagttggtattttttggtgttatttttagatcgttatttttaatttttttttaaagtaaataaataatatttgttggtagggtatattttaatatttttattttgatgaagttttattttttatttttatatttatttttatttttgtttttatttttatgttattttttatttttttttagttagttttattatattattaattttatttatttttttttagtcgtttttaattttttatcgaattattgttgaatttgtatttttttttttttttgcgtttatatagttgttttcgttttatatatagattgggtaattttttttatttttttatatttttaaattttttttaatagtttttatttttatttttttaaagaatttttttattttttagataggtttagtaagatttttttagatattttattttagtaagttgtcgtttttttttatatttatttaaaaaatttttttttttatattaattttattttttttatatttggattttttataatataaattattatttttgtggtcgtttttttatgtatttttcggtaaagatttattggaatttttttaggtaattttttattttttcgatgtttttttattttttattttcgaagtttaattatatatattattgaaataattggagttttttagttttgtattatagataagttttttattaatattggtaaatttaaatatattagtagttattattgtttaggaagatatttattttgtattttattttatttttggttattttttttttgtttgttagattttttttttaggttttttttttgtttgtttatatttagtttcgtaaataatagtgaaaggttgttcgtagatatttaaagtttttttatatattatgaaaattaaatttttttttttacgtagttattttattagtttttattataatttttgacggttgtcgttttagttggatttttaggagtttgggtataagatattttttttagtatttttttttatttttttattttgtattttcggttttgtttcgtataaggttttttttttttttgtggattttttatttatatgtgtttatttgttaattggataggtatatgtatattagttttttttatttttaaaattaatttgtaaatgggattgaatatttttttgttttttttatgatatcgatataataaaaaagagttatttcgttaatttttttgtttgtcggtttaggattttttgtttttattattgttttcggtattggaatagtaggtattttaatttttgttacgattttttatagtttttttaatgatttttttgttagtattatatatatattataaattttattagttttttaggtttaagttgattttttagttgtagttgttttttaaaattatcgaggttttgatttatttattgttgaaaaaggaggattttgtatattttttaatgaagagtgttgtttttatttaaattaatttggtttggtgtatgataatataaaagaatttaaggatagaggttaaaaattcgttaattaagtaagtaattattttgaatttttttgggtattttttaattggatgttttgggtgtttttaatttttagttttttaatatttgttttttttttttttttattcggattttgtatttttcgtttagttttttaatttatttaaaattgtatttaggttatcgttaattattgtatacgataaatgttttttttgggattataggcgtgagatatcgtgtttagttatttttttttttttaaagatgataattatttttttttagttgtttttttttttttttttttttttttgagatagagttttattttgttatttaggttggagtgtagtggcgcgattttagtttattgtaatttttattttttggggtttaagtaatttttttattttagttttttgagtagttaggattataggtattcgttattatgttcggttaatttttgtttttttttttttttggagagatggggttttattatgttagttaggttggttttgaatttttgattttaggtgattcgttcgttttagttttttaaagtgttgggattataggcgttagttattatatcgggtaataaatgttttttttaataattttataatattattttttattataaaatttttttttagtttaatattttttattttaggtttttatatcgtttttaatttcgttcgaagaagttttgagaaatattatttattatttttttatattatttttaaaaattttcgtagttttaatattttattattattttgtttattaatataaggagataggaatgttaggtttttgagtttaagttaagttattatattttttgtgatttgtaggtatatatttagatggtttgaagtaattaaagatttataaaagaagtgaaaatagttttaattgatgatattttattattgtgatttgtttttgttttattttaattgataaatatatttttttttatttttacgaaggtattttgtaatatttttttttgtttttaagaatgtagtttgtatgtttattttaaatttataagaattaatgataattttattattttttgttgatttttttttcggatttagttcgtttgtatttaggtgaaataaatagttttattgtttatataaagtttgtttggtggtttttttatatagacgtcggtgatattatttttttaagtcgtttggttagtagtttttaattgtttagttatttttttaatagtatttttagtgtagttaataaatcgttattggttgtaatagacgtagtttatttaatttatatttttattaattgttatttattaaaatgttgatttaaattttgtagtaatttgattttgggttttaaattgatttggtattttttatgggatttttaattgtgtttaaatagacgtgagagtcgaaagatttataaagggttttttttgttttatgatatttattttttttttttttcgttgatgaaataatagggtgaaagggatagttaattggaataaagtataagtgttattttagttatttggtagtgtttagtaaagatttattataatattattatatatttattcggggatgaataagggttgattgattgataagtttttgaaaatttttaagtttattgtattttttaggtttttaaggaatgttaagttttttttttattgggagagatacgaagtgaatttagtgttgggagatagaagttggatggttttcgggggttgacgcgtagggtgtcggattttaggatatagtagagagagagtttggcgtgagttattattttaggttgtagaattttggaaaagagttattatgtagtttatatttggtcgattggaggattattttagtggaaaggggataatttgggtttttggtttgttatgtgtataagtataataattgtttttgtttaatgtggacggaatatttgatttattttaattaggtatttgtattttggtattttgtgttaattgttaaaatgttttttaagtttttaatttttatgattttttagtaaaatgaatatatggttttaggaaattataaaaattgattggggtagtttatatttgttttttagtgatttatagaacgttggatcgattacggtataaaagttttatattgggggttaagaattttggttgatattgggatttttatcgaaattttttcggatttagtggttttaatttattaatgtttagtgtgaggagagttaggagggatagaggtattttttagaagtagagagttgtttttgatttggtaagtttttacgggatataataaggtaagtattaaatgtaatagtttgaggcgaaattgatttggttatgttaataattagatggttagtaatagagcgaggaaaggagaaagagtaatagaatagatgaaagagttaaattttttttagttttaatttggtagggtttttttttgggattatggtttataattttggagggggtggtgtttttttgattcgggtgtgatgaatttatttttttttcgttgtataaattgtagtttcggtggttggtagtataaggtagggttttttttaggttggttcgagttttttttttttttattttttgatgataatatgatttttaggttggtgttggtttattagaaattttaggggtggtatttgtgttaaaatatttttagttttgagggagaggaaagtggaagataaattaagtatataatttttaagaaatcgattttttgttttaaatgtggggatattagtagtggattttatagtttttggtgtttttttattgagaaattttttttagtatttatttttattagtttttttagattaaagaacgttaaatattattttatatttgatagtgttttttgtatgatttttatattagataagttaaattttatttttatattagtgtgttattaatttttttttttgaaacggagttttattttgttgtttaggttggagtgtagtggcgcgattttggtttattgtaatttttgtttttcgggtttaagtagtttttttgttttagttttttaagtagttgggattataggtatacgttgttacgttcggttaatttttttgtattttagtagagacggggttttattttgttgtttaggttggtcgcgaatttttgagtttaggtaatttgttcgttttggttttttaaagtgttgggattataagcgtgagttatcgcgttcggtttattaatgttaaatttagttttaataatattttgtagatatatttatttaatttttaatgtttgattataaggtaagtttttgttttttgtttttttttttttttttgagatggagttttgttttgtcgtttaggttgaaatgtagtggtacgatttcggtttattgtaagttttatttttcgggtttacgttatttttttgttttagttttttaagtagttgggattataggcgtttattattacgtttggttaattttttgtatttttagtagagatagggttttatttgttagttagggtggtttttattttttgattttatgatttatttatttcggttttttatagtgttgggattataggcgtgagttatcgtgttcggtttataaggtaagatttttatagattgtttttttttttttttttgagaaggagttttatttttgttgtttaggttggagtgtaatggtgtaattttggtttattgtaatttttgtttttcgggtttaaggaatttttttgttttagttttttaagtagttgggattataggtatgtattattatatttagttaattttggatttttagtagagatgggggtttttttatgttggttaggttggtttcgaattttcgattttaggtgatttgtttgtttcggttttttaaagtgttgggattataggtatgagttattgagtttggtttgtttttaattttttataatttttgttaaatagcgggttagtgttttaagaaaaattcgttgtgtttttattttaatgtttagtttatagaaaaattgggtgatatttttttaattttagttaatatgtttatatatataatttttattataattaatattttaaaatttgtttaaatttttaaaataaatttttttttttttttttgagatggagttttattttgttatttaggttggagtgtaatggtgcgattttggtttattgtaattttcgttttttacgtttaagtgatttttttgttttagttttttgagtgagtagttgggattataggtgtttattataacgtttagttaattttcgtatttttagttgagacggggttttattaggttggttaggttggttttaaatttttgattttaggtgatttatttatttcggttttttaaagtgttaggtaggattataggtgtgagttattatgtttggttataaaatttttttttaattttttaatgtaggtaaaaatttatatttttatgtttttttataatttttttattaaaagtatattttattttttttatatattttgtatataaattgtttttttaatagttttatatttagggtaatatttttggtggtttttggaatgtgtttagatttgttggttttttgtttttagtatttttattattttaagtagttatatattttaaagaaaatgttaaattattatatttgtagtttattagtttgatatatcgtttttttttaatttttatatttttattttttgtttgtttgattattaataaatagtgtgggtttttagagtttcgggtttttgtaatttttatattagtattggttttttggttttattttttttttgaatttgtgtttttttatttttttgattttgttggatttcgtagtttttacggtttggtgttgggtttgattattttaaaaggttgatggtttttttttttttttttgtattgttgagagtttgggttattttttgtattgggtaggttttgattttttacgtttgaggtcgttataatagggcggggtttatttttttaagagagagaattagagattatttttagaggggaatgtaattttagataagtttttaaattgttatatataaagtttcggtgtcgtaaaaggaatattatttaaatataaaattttttttttaatttttagtaaggttaggtatttttatatagaagggtgtatttttatagatggaataatggtgagcgtatatttggataagggaggggaaggggtttttatttttaatgtacgtggtttttgttgttgtttcgtttttttattggttagggttagatagtataggttaaattaattttgattggttaatttaaagagaatgacgggatgagtgttttggcgggagttagggtagagtaggtggtaggtgattaaaatgagttagggtggagtaggagattagaatgagttagggtggagtaggtaattaaaaaagattgttttacgaggaagttaagtttaaaagtagaaggtaaagaattgaatataatgataattatttgaaaagaaatttagaatttatatttaatattttggaatataagaggaagttgtatgttgttttttcggttttattttaggtagttttagtttttttgttgtttatagaggtttggagtaggagagatgttaagatgttatggagtgtttatttggttattggtagtttgggtaggttgtttttttttgggtttgtggtgacggaggggaggttaaaaggcgtagattgagtttttaggtggttgtaggtagttttagtttagttttgaggattttttttattatggttatttgttttagtaattgtgtttaggaagtggtttgttgtttgttgtgttgttgttttttttatttttgtttttttttgttattttttatatgttttagttgataagtaattttttgttttttttggttttttagggaaagggttaagaaatagtttatgtatatttcgattttattagtttaaggtgggtaaaggagtgtggagtagtttagagtatagagttttgggggaggagttcgttaataagggacgtttttttatagttatatttaaatgttagttaggttgaggtggataagttttgttagttgttgttatttttagaagatagacgtagtagtaaggaatatttgttttgtttttttataaaatgtttaaaagtattgtggttaagaaattttaggtcgggcgcggtggtttatgtttgtaattttagtattttgggaagtcgaggtgggcggattacgaggttaggagatcgagattattttggttaatacggtgaaatttcgtttttaaattagttcgttgtggtggcgggcgtttgtagttttagttattcgggaggttgaggtaggagaatgttgggagtggtggtatgcgtttgtagttttagttattttggaggttaagatgggagtttagggcggttgaggttgtagtgagttaagatcgtgttattataatttagtttgggtaacggagcgagattttgttttaaaaaattaaaataaaataaaaatttttataaggaagaaagtagttatttttatagagttttttttatgtagtgttagtataatcgtttaagaggtatttaatgtagagaaacgacggtgaggttagtagtattaaggagtagggtttgaatttcggtttttgtttttttttttttttttttttttttttttttagtatttattgattatttttgggtgttttttagagagggggatgtggtagggttataggatagtagtggagagaaggttagtagataaatacgtgaataaaggtttttggtttttttaggtagaagtttttgcggttttcggtagtgtttgtgtttttgggtatttgagattagggagtggtgatgatttttaagtatgttgtttttaagtatttgtttaataaagtatattttgtatcgtttttaatttatttaattttgagttgatatagtatatgttttagagagtatagggttgagggtaaggttatagattaatagtattttaaggtagaagaattttttttagtatagaataaaatggtgttttttatgtttatttttttttatgtagatatagtaataatttgattttttttttttttttttatatttttttttttttttttcgataaaatcgttatcgttattatggttcgttttcgatggtcgttgtttttttagagttgttgcgtatattttttagatagggtagtttggtagaggcgttttttattttttagacggggtggtcgggtagaggcgtttattttttagacggggcggtcgaatttcggtttttttatgttttagttgttgggttttggggaagttattttattttttttagtttgtgtattttgttttattattaaaaaatgagaatgaggttaagtgtagtggtttatgtttgtaattttaacgtttggggaagcggaggtaagagaattgtttgaggttaggagtttgagattagtttgggtaatataatgagattttaatttttgtaaaaaaatttaaaaattatttgggtatggtagtatacgtttgtagttttagttatttaggaggttgaggtgggaggattatttgagtttaggaatttgaggttgtagtgattgttttattgtattttagtttgggtgatagaatgagattttgttttaaaaaaaaaaaaaaaaaagtgaaaagtgaaaatgataatatttattatgaaggattgttttaagaagaaatgagataatgtatataaaagtatattatatatcgtttagtatgtggttgagatttagaaaaaattttggttttgtttttttgtattgggagtttattgttgttaaagtgatggttttaagaagttaaaggagagttagagaattggatagtttagtagtagttggtttgggttattaaatgttttttttttttttttattgttattgatttagattttggagatgtaaggttttaaaaatagtagtttattattttttatttttggtaatttttgtaatttggttttttattttaatgaaaaaaattaatggttttggttttattatttaaagaaaggaatgatagtataatattaattataaataaatgggttaaatttttggttttagagttttaaagatttatggtattaaaaaaaaaaaaaagaaaaaatggatcgggcgtagtggtttacgtttgtaattttagtattttgggaggttgacgcgggtggattatttgtagttaggagtttgagattattttggttaatatggtgaaatttcgtttttattaaaaatataaaaattagtcgggtgttgtggtacgtgtttggaattttagttatttgggagattgaggtatgagaattttttgaattcgggaggtagaggttgtaatgagtttattgtattttagtttgggcgatagagtaagattttgttttaaaaaaaaaaaagaaaagaaaagaaaaaaagagaaaatgaagagtttttttttttaatatttttattaatatatgtatgtatatatatttttgtatgtagttatgaatttttatgtgtgtatatatatatttaaaggattagataaagattttttagattttgtaatagggaagttaggtggaagtagggagttagaatggataatgtatgaagaaattattaatgtgttttttttttttatatttttttgtttttagtaagtaaatgattttttttttatttggttgtggtattaaattgtttgtgaggagattaagattgttttagaagaaatataaagagaaggaaatggtaatatgtatttattgaaatttaaaataggattttgtagtaagataatggatttgaaaattggattatgagaaagaaattgttttttgtatttatttagtttttatttaatataattaagagttagatttagaattaagtttttattaaaggaggaggtaatttaattttttatttttgattttttatatgtttataatgaggataataatagttattttaatagattgtttttaaagggaatttttgttttttgaagtggtaattagagttaggaagttaaagataagatatgaaaagaataaaagagaagtttattattttttattttggagttttaataagacgaaggtagggaggtgagagttaaggagatgttttggaattgggggaatggttttagaaatatttagaaaatagaagagattattgaagttgttataaaattttgtttattgtagataagtgggtaaattaggatgtattggtagggagatagggtttgttttgtgttattagtttttttttagtgatgggtattgaattgagagttatgggtttgttatggggtatggggggtaggaagagggtgatttggtagtagaggtatgtggtttgtataatttggttaggagttgaatgggagatatggtagagatttaggggttttattgggttatcgagagttatagggaggttgagttagttagaaagtattagtgagattagatttagttaagagatttacgagaaattttaaatgttgattttagttaaaggtttttaggatgaatgtgattaagtatatattgatttataaatcggaggagttggaggatattttgagaatttaaggatttttgttgtttttttatatttgtttttaggagattgtttaagttattttatttatttttatgtttatgggtttgtgagttgtttgtggtttgtttaattaggttgggtttgatagggtttggtaggatttttttagttttggtttagtgtttattttgggttatagttgaaggggtaatggatatttggaatttgttttttttttgttagattataggagtgtaagaggttaagttaaattataaaagtatattgaaagtatttgtttgtatcgtgttttttgatattttgttggtataagtaagttatatagtaaaggggatggatgtatatttaaataataaggaggaagtaaaggattgggaataatagtttaaattattatagggttttatttatttttaagaagtaatatttttagattgatttgggaaatttaagagtagatgatgttttttatgtgttaagaatattagtggagtattatatagagggttttaaaagttagtacgttaaggatgatggagtaggatgaagagattttgggttttagataatatcgttagggggtttattggttgttgattttcggatatttttgaaatatgaaataattaaatgtttttattaattgatattattagttgagttttttgttgtttttatttgaatgtatttttattgttgtaggattttatttttatttttatttatttatttatttttgagatggagttttatttttgtcgtttaggttggagtgtaatggtgttattttggtttattgtaatttttatttttcgagtttaagtgatttttttattttagtttttttagtagttgggattataggtatgtgttattatgttaggttaattttgtatttttagtggtgataggttttatcgtgttggttaggttagttttgattttaggtgatttgtttatttcgattttttaaagtgttgggattataggtttgagttattacgtttagttttgttgtaggatttttattaattttatttgtttatgagatttagagatataaaggcgggagtttgggttttttgttttgttgtttttttaggtagttttttgaattaaaatgggtttagagagattttttggaggttgggtttgattttagattttgtttttagagtatatgtttttatttattattgtgttattttattttttaagtttgcgtgaggttgaagtgttttatgtatttgtagtttatttaaaggataaagtggtaaaatgtttttatagtgaaaaagtgaaaggtttgtgtatggtagtaaaaaagtgttaatgtgattttggtttggtcggtagttggttaatttaggaaagagttagtttttagagatttttatttagttgtaaggtttgttttgggattgttttagttttatttagagaggaatgttgtagtgaaggtgattttatttaataatttagttaaatttgtttgtttgaattaggtttttttaagtattttttttttttattattttatttttttttgagatattgggaaggaaatttagtaaatagttggtttaagttattagtttttagatttattttatagattaagatatttggattatatggaaatatttgtttaagttgatattagggatagatttaattatggtttgtttttaggaggtgtttagttaggatttattaataaataaataaattattatttagtattaaggattgatgattgttattaggatttagcgataatttgatttaaagttttatttgttagaatatttagggttattgatatttaagggaattgattgacgttagttaaagttatacgagattgataggtaagttagaatatttgggatattgatttttttagtgagtagtgaatttttgttttttagtttaaggtattttttggtattaaggtgtagatgtagattaaataagatgattatttaatatgagttagagggttagaatttggtgagggaagtttttttagggttttgtagaagttattgagttattcgtgttttgggtggatttaggaattttgaaagtgtgatttaggtcgggtgtggtggttgacgtttgtaattttagtattttgggaggtcgaggcgggtagattacgaggttaggaaatcgagattattttggttaatacgttgaaatttcgtttttattaaaaaatataaaaaattagttaggcgtggtggtgggcgtttgtagttttagttattcgggaggttgaggtaggagaatggtatgaacgcgggaggcggagtttgtagtgagttaagatcgtattattatattttagtttgggcgatagagtgagatttcgttttaaaaaaaaaaataaaataaaaataaaaataaaataaaataaaaaaattggaaaatttagttttgtttaagtttttttttttgtttttgaggggagttaatttttagaaatcgttgttgttttttttattattttgtatggttgttggtttttaggtgattattttagaatttttaagtgtttagggttatttttgttgtatttgttagaatttttaagttttattgattttttatgatgatggggtttttggtgttgatatagtttagtttttttatgagaggtttttgtatagagggattaggattgtattgatatttttttgtttagggttttgtttttatagttgggttgtagtttttttttttttcggtttttttttttgttttgaagtaggaggattttttagggtattttagtttgtcgtgttttttttatttatttcgttaaatatatttattggtggttaattttgtgatattaatgtgttaagtattggggtagtggtgaataaaagttaggtttttgtttatgtagtttagggtttagttgagaatattaatatttaatgagatattataatgaaatgtgttgagagttatggaatagagatatttaatttagtgggagagaaagtaaagttttttttaataatgtgaagtttatgatgagaattggagaatgagtagaaattagtttcgtaaaagaatgggggcgaagaggtttattgttttatataaattgtttttaatagtagaaaaatgttttatgagataattatttagatatagagttataattaatattaaaaataaaataagcggttaggcgtggtggtttacgtttgtaattttagtattttaggaggtcgatgtgggtagattacgaggttaggaattcgagattagtttggggaagttaatatggagaaattttgtttttattaaaaatataaaaattaatcgggcgtggtggtgggcgtttgtaattttagttatttaagaggttgaggtaggagaatcgtttggatttgggaggtagaggttgtagtgagtcgagattgtgttattgtattttagtttgggtaatagagtaagatttcgttttaaaaatataaaaaaaaataaagaaaagaaaattaaaaataaataagtaaagaaaaaaaaatgttttttaaaaagagagtatatttttaaattattttataagatttaatataatttagtttggtagtagtggtttatgtttgtaattttagtattttgggaagttaaggcgggtggattttttgaggttaggagttcgagattagtttggttaatatggtaaaattttatttttattaaaaatttaaaaatatttttttaaaaaattaggcgattatggtggtatatgtttgtaattttagttattcgggatgttgagatataagaatagtttgaattttggaggtggaggttgtaatgagttgagattgtgttattgtattttagtttgggtgatagagcgagatttttattttaaaaaaaaaaattaatataatttttataataatattagataaagatagtgaaagaaaggaaagttataggttaattttattgataaatatatttggaaaaattttaaataaaagttttgtaaatgaaattaagttgtgtgtgtgagtatgtgtgtgtatttgtgtataatgttaatttgataatgaaaaataaaaaatttataaataatgatttattttatttagtataatgtttttgaggttttttatcgttgtagtatataatgtattattattatatttttttttttttttttttttttgagatagggttttattattgtttaggttggagtgtagtggtgtgattatgttttattgtagttttcgttttttgggtttaagtgatattttaattttttgtttttcgagtagttgggattataggtacgagttattatgttcggttaatttttttttttttttgaggaagtaatttttttaattttattagaatttaggatataagaagaaaaatatttaaaaattatatggagatagaagataagatataattttttttttattgtttttttgttttagagtggggataaagtgggggtgagatagttggggggagatttgaattttagtttagttttataggttttaggtttgtagggaaggagggtaacggggaggtagggtttagttttttagtgtggggaaatagttgagggaaggttttttttaaaaggttttatttttttattagtatttttgtttagggatagggagtttatagtagtaaggggattttcggggttatggttacgtttatgattgagaagtagttgagtggaggtaggagatataagattatttgggtagaattagttggggtaggggtttgggagggttttatgggttaaattttaaggttataggagggggtttaaagtggggttagtgagtgaggttttgagtgagtgggttagtggttgggtttttttttttagttgtttgtagtttttttaatattgttgttaggggggttcgtttttagggaaatgggataagaaagtagtttgtttttattgtagatagagttaggtggttgaggttaggaaggaaggtttagttaggttttgttatttgtttttagaggtttgtgggaaaaggataggttaggaagggtggggataggggttcgattagtttagatttaagatggtgttatgtttatttgttgagttttttatgagttggggtattgtattggggttagcgattagttagataggaggtagtagttttttaagaaatttttttatagttgttattttttgaggataggagttgtgtatgatatttaggtatgtttggaattggattttggtaggtgtgataatagatcggagttttttagttattagggttttaaatcgtacgggtattatggggtttagttttttatggtattggaggatggttaggtttttggtattgttattagttgtttgggggaaggttcggtgtagaggcggttagtagtttaaagttaggatgttagttagagggtgggggtaggtgagggttatgtagagggatagggttcggttttgtgaaaagttttttaggatgatttgattggtagggatttcgttttttattttatgtttaattaaggttttgatgttttttgttgtttttttgatgttagtttcgttttttggggtatttggatttagttttattaggttaaattaggagggtattattatttttatgttgagggttatagggattttaggtttatgggaatagatgtatttgacgtgagggagtcgaatggtggagagggcgttagtttagttgtgttttgtgtttttaagtttatgtaaaaaaataattacggtcgtttttcgtttagttttagatacggtggtagtatcgttgagtaggggtatagatatggtgttattatatatatattatacggttttatggtaggggtttttattttttgggatttttgaggtcgtttgggtgatttttttttttttttcgtagatatatatttttttttttcggtcgttttcgtcggaatattaatttttttatttttttatttttagtggatatggggtttttttatgttatttatttagtttggttttaaatttttaggttttagggatttttttgttttagttttttaaagtgttgggattattacgtttagtttattattttttgtgttttttttatttatttttttttttgagatagagttttattttgttatttaggttggagtgtagtggtatggttatggtttattgtaattttaattttttaggtttaagtgatttttttattttaatttttttagtagttggtatttttttttatggttgaataatattttattgtttgtatagattataatttatttatttatttattagttagtgggtatttgggttgtttttattttttggttattataaataatgttgttataaatatttgtatataagtttttgtgtggatatatatttttatttttcgtgggtatatatttgggagtagaattgttggattattttatagataaataaagttagatattagttaaagtggtaaggataggataggtatagaggtttacgtttgtaattttagcgttttgggaggtcgaggtaggcggattatttgaggtaaggaattcgagattagtttgattaatatggtgaaattttatttttattaaaaaataaaaattagttgggtatggtggtgtatatttgtaattttagttatttaggaggttgaggtaggagaatcgtttgaattcgggaggtagattttgtagtaaattaagattgtgttattgtattttagtttaggttatatagtaagttttcgttttaaaataataaataaataaataaataaataaataaataaagtggtaagaatagattttaattagtgatatattattgtaatagggaaaagagtttagtttgaattgaatttaattttgatttgtagagataattgggtattttaaagtaagaatgaaagaatagagagggtgagtggggatttaatgacgttagagaagtgatagattataaaaagtgggaagggggttggtttgtgttaagtttatttggttttgttagttggggtttattattaggtttttatatttttatagtagttgggaaataggggttttatttttatttgtgggttggaataaatagtatatttttttggtagttttgagtttttttagttagatattttaaagggtattagggttattttagagatgtggttttgaattgttagaaattatgttagtgtttatgaaagtttttattaagtcggacgtagtagtttatgtttataattttagtattttgggaggtcgaggtgggcgggttatttgaggttaggagttcgaaattagtttggttaatatggtgaaattttatttttattaaaaatataaaaaaaattagttgggtttgggggtaggcgtttgtaattttagttatttaggaggttgaggtaggagaattgtttgaattcgagaggtggaggttgtagtgagttaagaacgggttattgtattttagtttgggggtaataagagtgaaattttgttttaaaaaaaaaaaaaaattttggtttttttttttttattttttttttttttttttgagacggagttttgttttgttgtttaggttggagtgtagtggtgcgatttcggtttattgtaattttcgtttttttggtttacgttattttttttttttagttttttaggtagttgggattataggcgtttgttaatatatttcgttaattttttgtatttttagtagaggtggggttttattgtgttagttaggatggtttcgattttttgatttcgtgatttgttcgttttagttttttaaagtgttgggattataggtgtgagttatcgtgtttagtttttggttatttttttgtattttttgaaatatatgtaaatatgttggttttgtaaatattaaattaataataaaagttatgttatagtagattatattatatataggtatataattaataaagaattattgtttagaatttataaagaattttataaatcgatatgaaaaagataattaatttaagagaaaaaaaaatttaaatataggaaagataattttttaaagagaaaatagaaaatgtaaattaatattgatattttgggttttaaaaaaaagtaaattaaaataacgataagggttgggtttagtggtttacgtttgtaattttagcgttttgggaggttgaggagggtggattatgaggttaggagtttaagattagtttggttaagatggtgaaattttatttttattaaaaatataaaaattagttaggtgtggtggtaggtgtttataattttcgttatttaggaggtagaggtaggagagttgtttgaatttagggagggggtgggggcgtagaggttgtagtgagttgagattatattattgtattttagtttgggtaatagtgagatttcgttttaaaataaataaataaataaataaatatatatatatatatataaaataaaataacgatgaggtgaaaaaaataaaattaataaaattaaaaataaaataataaaataataaggcgatatttattaaattggtaaagataggtttgggaatattagatgttgttgaagttttagggtaatagggatttttttttagtggatgggagcgtaaattagaaaaattattgtggagattatttggtaatatttagtagagttgataatataattttatttatgagtttatatttagttttttttatatttgtttaagaaggtatgtagaagtatgtttattgtagtattttttaatataatagtatataaagtaattggaaatattttaaaatttataaatagaagaatggatatattatttgtgatatatttatataattgaatattaaagagttgcgttattttatatggtagtaatgagttatatgaggttatttaaatttaaatttaaataattaaaattacgtttatgttttatattttaaaaatttaaatttagttttttggttaggtacggtggtttacgtttgtaattttattattttgtcgaggcgggcggattaggaggttaagagatcgagattattttggttaatagggtgaaattttatttttattaaaaatatataaattagttgggtgtggtggtatatgtttatagttttagttatttaggaggttgaggtaagagaatcgttcgaattttggaggtggaggttgtagtgagttgagattacgttattgtattttagtttggcgatagagtaagatttcgttttaaaaattagtttttttgttatattagttatattttaagtgtttagtagttatatgtgattagtgagtatttatattagataatgttgatatagaaaatttttattattgtagaaagttttattggatagtattgttttataatataaaatgagttaattgggtttaaatattttaaaaagaaaaaaaaataaaaaatattaaaatataagatttaaaaatatgaagtttattagaaaaagaaggtaagttgtagaatatatagaatatttttttatttaaaatttggtatagtatgatgattatagttaataataatgtattgtaggcgcggtggtttatatttgtaattttagtattttgtaaggttgaggagggtagattatttgaggttaggagttcgagattagtttggttaatatggtgaaattttattgttattaaaaatataaaaattagttgggtgtggtggtgcgtatttgtagttttagttatttgggaggttggggtaggagaattttatgaattcggaaggtagaggttgtagtgagacgagattatattattgtattttagtttgggcgttatagtaagatttttttttaaaataaataaagtaaaataggttaggtatggtggtttacgtttgtaattttagtattttgggaggtcgaggggggcggataacgaggttaggagattgagattattttggttaatacggtgaaatttcgtttttattaaaaatataaaaaaaaaattagttgtgtgatggttgacgtcggtagttttagttatttgggaggttgaggtagaagaatggtatgaatttaggaggcggagtttgtagtgagtcgagatcgcgttattgtattttagtttgggtgatagagcgaaatttcgttttaagaaaaagataaattaaattaaattaaattaatatattgtatttttgaaaaatgttaagagattgaatgttgtgtttttattataaaaatggtaattatgtgaggtaatgtatatatgttaattagttagatttagttattttaagtttatatatgttttaaaatagtatgtaatatttatggaaattaagaattaggttgggtatagaggtttatatttgaaattttagtgttttggtaggttaaggtaagaggattgcgtgaatttaagaatttgaaattagtttgggtaatataggtaggttatgtttttataaaaaatataaaaaattagttgggagtggtggttggagtttgtagttttagttataggttgaggtgggaggattattggagtttaggtgtttgagattgtagtgagttttgattgtggtagtgtattttagtttgggagatttgttttaagaaaatattgaaaataaaaataaaaaagtaggttaggcgcggtggtttacgtttgtaattttagtatttcgggaggttgatgtggatggattatttgaggttaggagtttaggaatagtttggataataaggagaaattttatttttattaaaaaatataaaaattaattggatatggtggtgtatgtttgtagttttagttattttggaggttgaggtatgagaattttttgaatttaggaggttgaatttgtagtgagttaagaagattattttattgtattttagtttgggtgatagagttagaatttgttttaaaaataaataaataaatatttaataaataaataattaaattaaaattaaattattatgttttatatgataaatatgtaaaatttatttgttagtttaaaaataataggttgggtatattggtttatgtttgtaattttagtattttggaaggttaaggtaagtggattatttgaggttaggagtttgagattagtttggttaatatagtgaaattttgtttttattaaaaatataaaaattatttgggcgtgtaattttagtattttgggaggtcgaggtaggtggattatgaggttaggagattgagattaaaaaaaaaaaatttttttgagatagagtattttgttatttaggttggattgtagtggtgtgattttggtttattgtaatttttgtttttttagtttaagggatttttttgttttagtttttcgagtagttgggattataggtgtttataattatgtttggttaatttttgtatttttagtagagatggggtttcgttatgttggttaggttggtttcgaattttttattttaggtgatttgtttatttcggttttttaaagtattgagattataggcgtgagttattatatttggtttttaagaattttttttttttttttcgagacggagttttgttttgttatttaggttggagtgtagtggttcggttataaaaatttttgaataagaatggatgggggttgggtacggtggtttatgtttgtaattttagttttttgttgaggttggtaaattatttgaggttaggagttggagattagtttggttaatatagtaaaatattgtttttattaaaaatataaaaagtagttaggcgtggtggaaggtgtttgtaatttttgttatttagaaggttgaggttggataattttttgaatttaagaggtggaggttgtagtgagtcgagattttgttattgtattttggtttaggtaatagagtgtaattgttttttaaaagaaaaaaaaaaagaattgatgggttggtagggtattgatatttggaggtgttgggagggtggtgtttagatgggttatggaagcgttaagttttttttttttaaaagtttattttatgtattttttaaatttagttatttatttatatttttaaaacgttttgtataattaagtgataaacgtgtttttttgagttttgttagtaattttagtaaattatgaagttaaggagggggttgtaggaattttgatttatagtaggtttgttagaagtatagattatagttttggttttggaattggtatttaaagtgggaggtagttttttgggatttagttttttttttgtggaatttgatattatttttaggtagttagtggttgaattgaattaaataggttatttagtatttgttggatagttaattgtttggtgtgtggagaaaaagttttatatatttggttataagtgttttgtgttgtgtgagtagatagggagggtttttagggattatagaaatttaattattttgagtaattggtttgttttatagttttttgtcgtgtagtttttttttttttaaattttgtgttgattgtagttatttagttggttaaaattggtttttggtagattttagaaatttgtagataaatttgagtgaaagttttttattattatgttgaaatttttattttgggaggagttgtggttttatttttatagtatgtgatttgtgtgcgggcgtgaggatttattgtgtttttaaaattgggattttttttttatatgtaatgaggtatttttttttttttttattattttttaaaatttttttgttattttttttcgggagatattgttttgaagaatttttttagtgttttttttatttgtaattaaatttttgttgattaaaatttgttttgtggagagttatttgttatttgttaggtaaataaattttgtttttttttaggtaataagagtatggtggaagaaaatagtttaggttaggtatagtggtgtatgtttataattttagtattttgggaggtcgaggtaggtgggaggaatatttgagtttaggtgttggagattagtttgggtaatatagtgagatattttttaattttatttttataaaaaaaaaaagaaaaaaagatgtaattttagtattttgggaggttgaggtaggcggattatttgaggttaagagttggagattagtttgggtaatatggtgaaatttcgtttttatttaaaatataaaaaaattagttaagtatggtggtgggcgtttgtaattttagttattttagaggttgaggtaggagaattgtttgaattcgggaggtggaggttgtagtgagtcgagattttgttattgtattttagtttgggtgatagatcgatatttagtttttaaaaaaaaaaaaaaagaggttaggtatagtggtttatatttgtaattttagtattttgggaggtcgaagcgggtggtttatttgaggttaggagtttgagattagtttggttaatatggtgaaattttatttttattaaaaatataaaaattagtcgggtggggtggtacgggtttgtaattttagttatttgggagattgaggtaagaattgtttgattcgggaggtagaggttgttgtgagttgagatcgtgttaatgtattttagtttgggtgatagggtgggattttgttttaaaaaaaaaaaaaaaaaaaaaagtttgtgtttatagttgtataaggaagtggtgtttgtgaggtttgttgaggtttagaaattaatattttaaaatatgttaatatgttgaattgaagaagaaattttaaggtttttttgatttttttttttaattagtttttttataggtaggatgagttattttttgaagtttttttatttgttttaagtttagatatattataaagaataattgttttttttttttttttttgtaagattaggaatggaattatatttgagtaggtttttttttaaaagagtttgttttttagtttatttatattttatagggaattatttaaaatttaatttttatttttgggtttatttattttttttaataatcgtttatggttttttaagagaatttttgttttttattttataatttgttttgttaggatggtaaataagtttttgaattttgttgtggattggttaattattttgtggttttttttgtgtatatattaatttatttatatgttttttttttaatgtattttttttttttttgttttgttttgttttgttttttggatagatttttgttttgtcgatagggttggaatgtaatggtataattttagtttattgtaatttttattttttgggtttaagtgatttttttgttttagtttttcgagtagttgggattataagtatacgttattgtgtttagttaatttttatatttttattatgtttttaggttggttttgaatttttgattttaggtgatttattcgatttagttttttaaagtgttgggattatagatgtgaattatcgtgtttagtttgtatttatttttcgtgagttaattttttagttaatttttagagggcgaaagggaagtttttttttggtttatataggtttattatagttattttatgtagttttttatttaagtatgttataattttaaaagagaaaaagagaagggagaaaattgttttaagtttttaatgtgaaggtttggtatttttaaagaataatagtttttgtggttagatttttagtattagtatggattttttttggagaagtttagttagatgggtagattgggtagatgtttatattgattagttagatttagttaatgggtagagtcgttataatgtattggttgaaatggtgtaaaaaaataatgtaaggtttttttttttttggtataggatttggttttgttgtttatgttggagtatagttgtttaattttggtttattgtaattttcgttttttggatttatgttattttttcgttttagttttttgagaagttgggattataggaatgtattattatattcggttaatttttgtattttttgtagagatggggttttatcgtgttaattaggttggttttataatcgtttaatgtgtttattttgttcgttgtttagatagagtcgattttttaagatagaggaattgtaatatagaaagagtaatttacgtagagtttgttgtgtgggagataggagttttattattatttaaattagtttgtttaagaattcgaggagtagagtttgtttttgttgttgttgttttgttttgttttttgagatggagtttttttttgttatttaggttggagtgtaatggtaaaattttggtttattgtaatttttattttttaggtttaagtgatttttttgttttagttttagtagttgggattataggtttgtgttattatatttagttgatttttgtatttttagagataggattttattaagttggttaggttggttttaaatttttgattttaggtgatttatttgttttagttttttaaagtgttgggattagaggtacgagttatttcgtttagtttggggagtagagtttttaaggataatttggtgggttaggggaagttagtgagttaggagtgttgattggttagagatgaaattatagggagtttaagttgtttttttgcgttgagttagtttttgggtgggggttataagattagatgagttagttaattaatttgggtggtatcggttgatttattaagtgtagggtcgataaaatgttttaagtattgattttaggagatgtttagggagggttagaattttgtagtttttatttgtatgatttttaaatcgtaatttttttttttttgttttgttttttttttttttttgagatagagtttcgtttttgttgtttaggttggagtgtaatggcgtaatttcggtttattgtaatttttgtttttggggtttaatttatttttttgttttagttttttgagtagttgggattataggtatatgttattacgtttagttattttttgtatttttagtagagataggggtttatgatattggttaggttggtttcgaatttttgattttaggtgattcgttcgtttttgttttttaaagtgttgggattataggtatgagttattgtatttagtttaaattataatttttaatttgtgttagttttataaaggtaatttagtttttaggtaagaaggaggtttgttattgtttttgttttaaagggttattaaaataaagggaaagggttattattgtttttgttttaaattataaattaagttttttttaaagttagtttagtttaggtttaggaatgaatgatagtttggaggttagaagtaaaatggaatcggttaagttagattttttttattgttttagttataattttgtaaaggtagttttagtttttaatttttgcgtttaagtaatttatttatttcggttttttaaagtgttgggattataggtatgagtaattatgtttaatttgtaaggtttttttaaaaaaatataaaattagatatgaagttttttttggattgggcgtggtggtttacgtttgtagttttagtattttgggaggttgaagtacgtggattatttgaggttaggagttcgagattagtttggttaatatggtgaaattttatttttattaaaaataaaaataaaaattatttagtcgtggtgatgggcgtttgtaattttagttatttaggaggttgaggtaggagaattatttgaatttgggaggtggaggttgtagtgagtcgagatttcgttatcgtaaattagtttgggtaataagagggaaatatataattttgttttaaaaaaaaaaaaaggtttttttgaagaattgttgttagaaagtggttatgatttaaattttaagagagagtttttggattttatgtaataaagaatttaaggtaaatttataaagtgaaagtaagtttattagagaagttaagaaacgaaagaaggttattttaaaggtagtgtagttttgagggttgttgtttgtttattgttaagttattttttgattatatgttaaataagaggtaaattatttatgttttttttttttagattatatagggtaattttttgatgtttttatggtatttgtaaattgttaggttgttggtgggagtgtagtagtgaggataattagaggttatttttatcgttatttttgtttcggtgggttttagtcggtttttttattgtaattttttttattagtaaggtttttgtgatttatgttttgtgtcgattttttattttattttatgatttagaatgttttaagtgtttgggaatgtagtttagtacgttttagttttattttatttaatttttatttaagatggagttgttttggtttaaatgtttttgatagaatggaagttttttttttatttgtttgttttaaaaaataaagttaggtcgggcgcggtggtttatgtttgtaattttagtattttggaaggtcgaggtaggcggtttatgagtcgggcgtggcgagcgtttgtagttttagttattcgggaggttgaggtcggagaatggtgtgaattcgggaggcggagtttgtagttagttaagatcgtattattgtattttatttagtttgggcgatagagcgagatttcgttttaaaataaataaataaataaataaataaataaataaataaataaataaataattaaaaaaataaaaaataaagttagagtttttgttatattgtttaggttggagtttagtgattatttattgacgagattattgtgtattataatttggaaattttatagttttgaatttttggatttaagggatttttttgttttagtttttagcgtagttgggattataggtacgtattattatattaggtttagaagattatttttaattagtaaacggtttattagtaagatttgaaaaattttaaaaagttaagtataatttttaaatcgaatgtatttttattttgtatatattgtttttaagattttggtatttaagaaaaaaaaaataatattttttttagggttaataaatttgtaaagatttgttattatatgatttgttttaaatgtttgtagtatattgtttatataaattataatggttttcgtgaaatttaataatggtttaaaatttgtattatttgagataagtgaggtattagtgaatttattatgttttttttacgttgtgttatatttaaagataaaaatttatggttaggtatggtggtatacgtttgtagttttaattattttttagattgaggcgagagaatcgtttgaatttgggaggtagaggttgtagtgagttgagatcgtgttattgtattttagtttgggtgatagagtaagattttattttaaaaatttaaaaataggtcgggagtagtggtttatacgtgtaattttagtattttgggaggtcgaggtaggcggattacgaggttaagagattgagattattttgtttaatttggtgaaatttcgtttttattaaaaatataaaaattagtagggtattgtggttcgtattcgtggttttagttatttagaaggttgaggtaggagaatcgttaagattacgttattgtattttggtttaggcgatagagtaagattttattttaaaaaaaaaaaaaaaaaaaaatagaaatatagtggtttatattagttagtaattttagtattttgggaggttaaggtaggtggattacgagattaagagttcgagattagtttgattaatttggtaaaattttattataaaaaataaataaataaaaaaattttcggtaaaatagagtaaggttttattttaaaaaaaaaaaaaaaaaaaaaaattagttaggcgcgatggcggttgtttgtaatattagttatttaagaggttgaggtaggagaattatttgaattcgggagttggaggttgtattgagttgatatcgtattattgtattttagtttgggtgatagagcgcgattttgttttaaaaaaaaaaaaaagaaagtgattatattttgggaatgtattgattatattttaaaaagtttaggagaatatatagttgaggttgggtgtgatggttaacgtttgtaattttagtattttgggagggcgaggtaggtggattatttgaggataggagtttaagattagtttggttaatatggtgaaattttatttttataaaaatataaaaattagtcgggtatgatagtgggtgtttgtaattttagttatttgggaggttgaggtaggaaaatcgtttgaattcgggaggcggaggttgtaatgagtcgagatggcgttatggtattttaggttgggtgatagagcgagatttcgttttgaaaaaaatgatattattatattttatatgggtttatttattgttattattattattattttttgagatagagttttattttgtcgtttaggttggagtgtagaggtgtgatttcggtttattgtaatttttatttttcgggtttaagtgatttttttgttttagttttttgagtagttgagattataggtgttcgttattacgtttagttaattttttgtatttttagtagagatcgggttttattatattggttaggatggttttgattttttgatttcgttattcgttcgtttcggttttttaaagtgttgggattataggtgtggcgtttatgtattttgtaatatattttttttttttttttttttttttttttttgtgtgtgtttgtgtgtgtgtgtgtagaggtatggtttaaatatgttgtttgggttagttttaaatttttgggtttaagtaatttatttattttagttttttaaagtgttgggattataggtatgagttattgtgtttagtttgttatagattttaaaataaatttgtttatgtatttgtttatattttgtatattttaagtgtagtgtagttttaatatgtttaagtagagtttttgattttttttataaaatttttttttttttggtgtttgtttttttgtgattgattttgttagttatttagttgtttaagttaaaaatttgatattttttttttaattattttttttgttcgttttatttattttatgttttatttatttttaggttttgttggttttgtttgttaagaattttttatatttttgatttttttgtatttttataattatatttttgtttaggtttttttgttttttgtttggatgattatagtggtgttttaattatttttttttatttttatttaattattgttaatttattttttattttgtagttagcgtgtttttttaaaaatgtaaatatttttatattattgtttaaattaaagagtatttttttttattgttgaagtgtaaagttttatgatttgatatgtttttttattaattaataagggttttatagttaagaaaattaaagttatttttggttgggagtggtggtttatgtttgtaattttagtattttgggaggttgaggcgggtggattatgaggttaggagtttaagattagtttgattaatatggtgaaattttgtttttattaaaagtataaaaaattagttacgtatggtggcgggcgtttgtaattttagttatttaggaggttgaggtagagaattgtttaaatttgggaggcggaggttgtagtgagtcgagatcgtattattgtattttagtttgggcgatagagggagattttattttaaaaaaaaaaaaaaagaaaagaaaaaaagaaaattaaagttatttataggtagagggtttagagtttggttggtatggtaaatttttaaatttttatggttataagaaaagttatagttttattataaattttttaataatagggagttaggagttattagattttttttaattatgatttataatttagattattataatttcgagtagacgaaggataggttttttaaatattttgtttttattttattttattttattttatttttttgagacggagttttattttgtcgttaggttggagtgtagtggtgcgattttggtttattgtaatttttgtttttcgggtttaagtgatttttttgttttagttttttgaatagttgggattataggtgtgttattatgttcggttaattttttttgtatttttagtagagatggggttttattatgttggttaggttgtttttgaatttttgattttaggtgatttattagttttgggtttttaaagtgttgggattataggcgttagttattatgtttggttgaatgtgatcgtttttaatgatggtagtatttttatattttatataggattattagtagggtggataggtgagcggtttgtaggtggaatgagaagggtagttttttttttttttttttttttttagtagagaagtggttttattatgttgtttaggttgatgttgaatttttggttttaagtaatttttttattttggttttttaaagtgttgggattataagggtaagttattgtattaggttaagtagttattttgatataaagaaagtttattttttgattagtatagttaatttgggagagtagaaggttagtatattaattgaagagaagagaggatattaatgggaagagtttgttgggttgtggaataatttttttgaaagttttgagaggagataggtagagttatttttagaggataatttggtatgtagtatagaggttgtggagtggatgggatgatttttttgggtgttagtgaagtatgtggcgcgatattattagtgagggatatataggacgaaggatttttttgattatttgttattttaaggtaatagagatattattatagttggaatataaagaatgggggcgggggagttattattaggatttatatatatagtttaagtttaagggttaaagtggattagtcggtagtttaattatgtgcgatttataaaagaaatatttttttgttagtagaattgattttataaggttatagaattttatgagcgtttaatgggagcgagttttttgttggtataggttggtttttggttttgtagagtgatttaggaaattttaaggaagatattttaaagtgtagagtttttttaaatatagggttcgaggtagggtttaggttatttaggttattttacggtattttgtggaggtatagtaataatgtttaggttgggtgtagtggtttatgtttgtaattttagtattttgggaggttatggaaggtagatggtttgagtttaggagtttgagaaataatagtggtttaaataagagataagtgaattttttttgtaagtaaattttgagataattagtttaggattggtgtagaatttttaagattattaggaaggtaagatatttttaatttgtggtttttttttttttttttttttttttttttgagatggagttttattttgtcgtttaggttggagtgtagtggtataattttggtttattgtaaattttttttttcgggtttaagcgatttttttgttttagttttttaatttttaagtagttgggattataggtatatgttattacgtttagttaatttttgtatttttagtagagacggggttttatcgtgttggttaggttggttttaaatttttgattttaggcgatttgttttttttggttttttaaagtgttgagattagaggtgtgagttattacgttcggtgaagtttgtggtttttttatttttaataaatggtatggtttgacggggaagggtatatttttttttttagggttttttttgaaatgtggatatattatttttatttgtgttttattggttagagtattgtttattgttatatttagttttaagagaggttgggagttgagattttttttggtggttatgtgttttgtaaaaaaaaaaatttagggtttattaatacgaaaagattggagaaataatattggggggaaattaatagtttttattaaaggtttagtgttagtattagtattatgtttagttgtgagaggttggattaaggttgagagtttgagttatagtattttgtgtgggtaggatatttttgggtaggtttgtagtattcgaggtggtcgggtagaaaattttgttttgtggggatttttatagtagatggtggtaaattgtatgatgtagaagaaaaggagtgtttattttttttttttatgttgtttaggttggttttgaatttttgggtttattttagtatagattttgtttttgtaaatttttatttttttttattttggaagtagggaatttcgattaattgatagatttgtaggagatttttgtttttatttttagggtaaagtttttatggtttgtttttttttatttatttcgttagttttagttttttagattgtttcgtgttgtagttttttttagttttgtatatttgatgagttcggttttggtttgtcgtgttttgttgttgttgtttagggatacgtataattgtatagattgtgttaagaattttatatgtatgattttttttagtttttgtcgttgtttttttgtttatttgtattttttattgggtaggaattttgagaaatggaggtttatatttgttgtgtttattgttgtaattttagtaagtagtatggtgcggtatttttatagggtttttggttttagatcgttggtatatagtaagtgtttttttttttaaaattattattattatttttatcgagaaggagtttcgttgtgttagtttaggttggagtttagtggtgcgattttggtttattgtaattttcgttttttgggtttaagtaatttttttgttttagttttttgaatagttgggattagaggttcgttattacgtttaattaatttttatatttttagtagaaacgcggttttattatgttggttaggttggtttcgaatttttgattttatgattcgtttgttttatttttttaaagtgttgggattataggcgtgagttattgtatttagttataagtgttttttatgttgaatttgtagtttgtataaaaatgaattaagatattatgaaatatagttattttttttttttttttttgtgattaattttttttaaggagtagtgattagggaaaggaagatgtttttttagaatttttttagagggtatattttttttggatttttgatattgattttcggagcggtaatggattttatataaggagtggttattttttaggaggtttgtttacgtagatggagggtgtggtggtgttgagtgatgtttttttggtagtttggattggagattttagagggaggtttttatgtttaaaggtagggatttggaagaaggggaatgtgtgtgtatagattgttttttgtttttttttttttttttttgaagataggattttattttgttatttaggttgaagtatagtggtgtgattattatttattgtagtttcgattttttaggtttaggtgatttttttattttagtttttcgagtagttgggattatatttatgtgttattatgtttggttaattttttgtagagatagggtttttttatgttttttaggttagttttgaatttttgggtttaagtaatttatttattttggttttttaaagttttgggattacgggtatgagttattgtgtttggtttagatttttttttttttttttttttaatgagatggagttttatttttgttgtttaggttggagtttaatggcgtaattttggtttattataatttttgtttttcgggttttagaaatttttttgtttgaattttttgagtagttgggattataggtatgtattattacgtttgggtagttttgtatttttagtagagatagggtttttttatgttggttaggttggttttaattttttattttaggtgatttgttagttttagttttttaaagtgttgggattatagattataggtatgagttatcgtgttcggtttttttttttaggcggagttttgtttttgtcgtttaggttggagtggaatggtgcgattttggtttattgtaattttcgttttttgggtttaagtaatttttttgttttagttttttaagtagttgggattataggtatttattattacgtttagttaatttttgtatttttagtagagatggtgttttattatattggttaggttggttttgaatttttgattttaggtgatttatttgatttagttttttaaagtgttgggattataggcgtgagttattatatcgggtttagatttttatttttatttaacgttttttattttttattagagaaatgataataaaatatagaaaagtataattttttattttaattttatttttcgtttatttaaatgattagttatttttaagtttggatttgaaaatttttattatgagagattttttaggatttttatttagttttacgtgtagttgtgatattgtgtgatattggtatacggttggaaataatatttgtgtagtagtttgagatgaaatataggtaatgtttggtttttgaaagtgtttttaggtttgatgttatataagtatttttagtttaatttgtttttttttttatttttatttttatttttagttgggtatttggatagtttaggggaaaaaggggtaaagatgagatgataaaagatattttagtcgttgggtttagtattttgggaggttgaggtgggtggattattgaggttaggagttcgagattagtttggttaatatggtaaaattttgtttttataaaaaatataaaatttagttgggtatggggtgtaggtttgtagttttagttatttgcggggggaggggagttgaagtaggagaatagtttgaatttgtaaggtggagtttgtagtgagtcgagattgtgttattgtattttagtttgggtgataaagtaagattttggttaaaaataaatatatataaaaatatattattatgtatttttgaaagtaaatgtgttataatattgttttgatttgaatgttttttaaaatttatatgttgatatttaattttaattttggtggtattaagaggtgaggttgtttgggaagtaattaagttatgaggattttatttttatgaatgaattgagggaaagggttggagggaagggttggagggaattagtttcggtttttttttgtttttttattatgtgaggatatagtatttatttttttcggaggatgtaataataaggttttatgtgaagaaggaattaggttttttattagatattgtatttgtcggtattttgattttttattttttagttttttagatttgtgagaaatatatttttgttgtttataaattattttgttttaggtattttgttatagtagtataaatagatttagataaataacgttttatgtttataatttataggaggaaaattttggatttggaatttattttggtaagataatatatagatatgattataagaaaattagtgaggttataaatagtggtttattaatataggttggtatataaatataattttatataataaatatagttgatttgaagtaaataaatataatttattatagtattttgataaatgtagttttttataataaataattaaagttttaagttttaggttatagtttttagagttagtagtagttaattattgttaggtatagtggtttaaatttgtaattttagtattttgggaggttaaggtgggaggattgtatgagtttaggagtttgagattagtttgagtaatatggtgagattttgtttttattttattttattaaaaattttaaaatattggttaggagtagtggtttatgtttgtaattttagtattttgggaagttgaggtaggcggattatttgagattaggagttttagattagtttagttaatatggtgaaattttttttttattaaaaatataaaaattagtttggtatggtggtgtatatttgtaattttagttatttgggagattgagttagagtcgtttgaatttgggaggtagaggatgtagtgagtttagatcgtattattgtattttagtttgagtgatagagtaagattttgttttaaaataaataaaaaaaaattatttaaaaaaagaagtagtttattttagaggttacgcgattttattatagttttaaaaatggaatggtaggttaggtgcggtggtttatatttataattttagtattttgggaggttaaggcgggtagattacgaggttaggagttcgagattagtttggttaatatggtgaaatttcgtttttattaaaaatgttaaaattagttgggtatggtggcggatgtttgtaattttagttatttaggaggttgaggtaggagaatcgtttgaattcgtgaggtagaggttgtagtgagtcgagaatacgttattgtattttagtttgggggatagtgtaagatttcgtttttttggttaggtatagtggtttatgtttgttattttagtattttgggaggttgaggcgggtggattaggaggttaggagatcgagattattttggttaatatggtgaagttttatttttattaaaaatataaaaaattagttgggcgtagtggcgggcgtttgtagttttagttatttgggaggttgaggtaggagaatggtatgaatttcggaggtagagtttgtagtaagtcgagattgcgttagagttagattttgttttaaaaaaaaaaaaaaaaaaaaaaagattttatttttaaaaaataaaaaattttaaaaatggaatggtagttatttttgttagagattgagtatgtataaaagtaattttaaataattttttcgtttttggttaaatgttggtttattgtgatttggagtttattattattataattgtatttgtatttatattaatatttgtatttgtatttatatttatatatgtatttatatttatattatttgtttttttttgaaagattttattaaagtttttattttgtaatgttttttgttaaatattattatgattatttttaatttatttgaattaaggttgagttatagttttttaaatttttgaataatttttttttttttttgagatggagtattgttttcgttgtttaggttggagtgtggtggtataatttcggtttattaaaatatttattttacgggtttaagtaatttttttgttttagttttttgagtagttggaattataggtatatgttataatgttcggttaattttttttgtatttttagtagagatgggattttattatgttggttaggttggtttggaatttttgattttaagtggtttttttgttttggttttttaaagtgttgggattataggtatgatttattatgtttggtaatttttttttaagagtataaatttacgtttatttattgattttttttttttttttttttttttttttttttttttttttttttttttttttttgagacggagtttcgttttgttgtttaggttagagtgtagtggtacgatttcgatttattgtaatttttattttttaggtttaagtagttttttgttttagttttttaagtagttgggattataggtgttcgttattatattcggtttttttgtatttttagtagagacggggttttattattttggttaggttggttttgaatttttgatttcgtgatttattcgttttagttttttaaagtgttgggatgataggcgtgagttatcgtattcggtttattgattttttattagtttaaatttttgaagggtatagtattattcggattttgtgtttaatagttttagtgggaagattgttttagaatttggtacgaattatgttattgttttcgtgggtttgttttagtttttcgagtagttgggattataggcggtcgttattacgtttggttaatttttttggttttttttttttttttttttttttgagatggagtttcgttttgttttttaggttgtagtgtagtggcgcgattttcgtttattgtaagtttcgtttgtcgggtttacgttatttttttgttttagttttttgagtagttgggattataggcgttcgttattacgttcggttaattttttttgtatttttagtatagagagttttttattatgttagttaggatggtttcgattttttgatttcgtgattcgttcgtttcggttttttaaagtgttaggattataggtgtgagttaacgcgttcggttattaaatagtgtaatttttatagttatattttgtaattagtgttgttgaagacggaaatgtaattgattttgaaaattgattttttttttttattgattttttatttattaattttgttaaatttatttattaattttatttgaattttattttagggatgttgtatatgtaataattttatttgcgaatattaatattaatgttttttgtagtttttatatatttgttgtttattggattggttataatttttattgttttattgatgaggattattgagagtaggtatttttgttttgttttttattttgaaaggaacgtttttaatatttttttattatggtgatgtgttttgcgaaatttttgaagatgttttttattagtttttggagttttaaaaaaaatattaacgggtgttgaatattttgagtgattttgttgtattaattgagatgaatatattttttttttttaatttgttaatgggtttatatttttttattttatttaaatttttttttaatttgataaatattttttgttatatgtttttttttaggtttttttttttagttatttttttttattttttattgttggttttttttagttttttttttttttttttattgtgttttttttaagtttttgttttttggagtttttttaggatattaaaggttggggggatggtaatatggtttttagatagtgtgtttttttataatttgtttttttttataagtttgtttgaagttaagttaaagtaatggatagaagacggtagcgcgggtgttagatttgttaatttttaattgtatattaaattttcgaatatatgtttgaggtttttgtttttcggttttataaataaaattttgttttgattatttttaggattggatggaaattcggatgagtaaatatggtagaacgattttgtaaattagtattttatttatacgtaaggggttgtttttgttatcgagattgttagaggtaacgtgagttaatagaaatagtttggattttgaagttaatggaatttagatttatttttaattagtagtgtgattttattgtgtaatttttttgaatttgtttttatttatttttataaagaatgtggtataatgtaggaatttagtgaattttcgtgattaaaagacgagataatataggtgtataatttgtaaaatataaaatattttataaatggaagtagtaaatttttttcgagttcgagattttaaaggttttgagtttagtattagtaatagtatttaggtaagtaggttggttgagagaagagggttataaagaaaagtttttttttgagttttgaatttttattgttaggttttaatggagcgtaaaaatttttaaatttggtgagaaatggtaatattattagggaatgaatagattaggttatttatatttacgtgagggttttaggagttattttcgggtttagttaattacgattaggagaggtagcgttggagttttaattacgtcgacggaaaataagtgcgttttttattgtagttattaggaggcgttagtttcgtttgtttttcggtacgggttttcgtttgcgtacgcgttattttttttttttagcgttttcgttttttttttttcggtcgttattagtttcgtttggttagttgcgttcgtgcggcgacgtttacgtattttttgacgtagcgagcgacggcggggagtcgagcggaagtttagtattattgtcgttagaggaggggaggggtgagaagtataagtggtatcggaagtggaattaattcgtttattttttttgcgtttgcgaaatagaaaagataaggcgtttgtcgggcggggtgtggtttcgggtggcggagaacgttgcgattggttttcggttgtggcgatagcgacgattggtttttgcgtgtagagcgcggtgagagtgggtggtggtcgttggaatttaaaagtggcgggtgtggcgcggggttggtagcggtcggagtcgtgcgagttttttattttgtttcgcgagcgggcgagagaacgcgagttttaggattttcggtatttagtttttttttattgtattttttcggcgcgtgtgggatcgaggtggatatggattcgtaggtgagtaggggcggcgtaggtgttttgttttggggatggggacgaaggttgatcgtttcgatgttgtcgcgttttcggttttcggtcggtttttgttatgtttatcgggagagcgaaggttcgtgcgttttcgtataagtggaaaggggcggaggtaggagtggagacggtttagagtattcggggaggtcggaaggtacgtttgtttgtttttttttagttttaagtttttggagttttttttttaatttttatgttttcgagattttttatttcgaatttttaggttcgtttgatatatttttatttttttatttttatttagggtgtgattgtagtgtgtaagaagggagagttttgatatgattttttttttttggggatatggtgtttgaggttatatttttgttgaggtttttttgtgttaatcgtttttttttattattgttgtttcggagtgtaggaaagggagaaggagagtagggtaatttgggttaaaagattttttattttttttttttttttttaaattgtgtagatttttgtttaatgaaattgattgatttagtttttttttttaaatggtgttttgttgtattttataattatatgtagttttttgtttttagtgaagagagatgaatgtgtgtgatagttggagtgtatttatttttggtgttaggaaaggtttgtttgaattttttgtttattagtattttacgtttaggtttttttgaagttaggatttagttttaagagagattttttttttcgtgataattagagagtagagtagtattatgtgatagtaagaagtagtaaaagtttttttagatttattaattaagtatttattgagtatttattatatgttaggcgtggttgtaggtatttaggatgtagtagtgaataagggataaatcgttgttatcgtggagttgttattttatggggatatagataataaatgtaataaatgaattatataattgttagaaggtcgtaagtgttgtggagaaaaggagaaatttaaggttgaggatataggggaggttaattggcgggttagagtattaaatagggtggttttagtaatttttatggaaaagatgagttgaataaagatttgaaggaagtgagggagatagataagtagatagtgagggaagaatattttaggtagagggaatttgttagagtagagtttttaaagagttgtaaggagggaagtgtggttggaatgaagtgagtaaggggaaaagttgtgggaaaggaagttaggtaatgggtagtggggttgttgattatagtttgtttttgtgggggtcgttgtgaggatttttattttgagtgagatggggaattattggatgattttaagtagagagataagatttgttgggtttattagattttcgtaattatagtattattgtttttttttttttttttttttttttgagataggttttttttttttgtttttaggttggagtgtagtggtatgattatggtttattggagttttaattttttgggtttaagtgatttttttattttagttttttgagtagttgggattataggtagttgttattatgtttggttgattttttgtatttttaatagagatagggttttgttatgttgtttaggttggtttggaattaatttttgggtttaagtaattcgtttgtttcggttttcgagagtgttgggattataggtatgagttatcgtgttttgtaatatttttttttttttttttgagaagtagttacgttttgtcgttagtttggagtgtagtggcgcggtttcggtttattgtaattttcgtttttcgggtttaggcgatttttttgttttagtttttcgagtagttgggattataggcgtttgttattacgttcggttaattttttgtatttttagtatagatagggttttatcgcgttagttcggatggttttaattttttgattttatgatttttttatttcggttttttaaagtgttcggattataggtatgagttattgtatttggttaatattttttattgtcgtgattaggtggggggttgttattggtatttagtgggtagagggtagggatgttgttaggtatttgatagtgtataggattgtattggatattgttaaatgttattttggggataaaattatttttagttgagaattattggtttatgataatttaggtgttagatgatggtgttttaggttagggtgatagtagtggaagaaatagtaaaaagtgattggattttggatatattttgaaggtataattagttatgttttgttgatagattagatgtggtatgtaggagaaagagaggattttgggtttttggtttgagtaattgaaagatggagttatattaattgagatggagaaagttgtaaaaggagtaagtttaaagtagggttggatattaagaggttagttattagatttttaaatggagattttttttgatacggagttttttattttgttgtttaggttggagtgtagtggtgtgattttagtttattgtaatttttattttttagttttaagtaatttttttattttaatttttcgagtagttgggattataggtacgtgttagtatatttggttaatttttgtatttttagtagagatagggttttgttatgttggttaggttggtttcgaatttttgaatttaagtgattcgttcgtttcggttttttaaagtgttgggattataggtatgaggtattatttttagttttaaatagcgatgttgacgatgtagtttagtataggtgtaggatcgaggtttgagttggatatataaatttggaaattgttagtatattaatgatatttaaaggtatgggagtggatagtgagtatagatagagaatgttgttaaaatttggagagatgaggaggatttgttagtgaggtaagaaagagtggttttttggaagttaattgaagaaagtttattaaggaaaagggagtaattagttgtattagatgttgtttgatgggttaagaaaatgaagataaagaattgatttagtaatatgaagttatttgtgattttgaggatagtaatttcgatggaatggtgggaatgaaagtttgattgtaatgggtttaggagagaaattggttacgatgaatatattagaggtaatattttagagttttgttgcgaaaggcggtaaggaaaaaggatagtatttgttagggaaagtagagtttagatttttttagtttcgaagaaataatagagtttgtggtatgttaattggagtgatgttatagagtataaagttgatggtgtagaggtgagaagggaggattgttggaggaatgtttttgaaattgggaggatttggcgagtttaggatttggtgaggagggatgggaatgtgatgtatatatgaaagggttgttttaggagtagggttatttatttttgattttgtggtgaggtggatgtaggtagggttgtatgaatatttgtttttatagaaggttaagtgtttatgttttttattgtggaaagttggagggtattattttagttttatattaatagatgggaaaaatatatatattgtggtttttggagttgttttgaataaataaatttttaaatatattttttgaatcggtataaattttaaggaggtaggtttgtagtagatttattacggtagtgtagagaggaggaagggtataggttatttttaaaaattagtgtttgattttggaatatttaaagaaaaatttggtttttatattatatttgattatattaaattaaaataagttttttttgtgtatatttttgtaggtggtaggaaaaatgttatttttttttttttttttttatttttatagaagttaatggtatggatatattatagtttaagtattgttttattgatgaatatttaattttatttttttaaaaattgtagagttttattatgtagtagatattgtattaggttttttggttatatagttatgaataaaatagatgaatttttatggtgtttatagttttatgtaggggttatgataataaaaataaaagaaaatagtgtattaggttgttttatgatttttaaaaataatgatgttttgtgaatttttttgagtaaattttattgtattacgggtagtttaaatttatttttttaaaattgaatttagtatttatgaaattaattttgttgggtttagtggtatgtgtttgttgttttaggtatttaagaggttaaggtaggaggagtatttgaatttaaagtttaaagttagtttgggtaattttgttttaaaaataaataaataaaaaataattttttaggtatttagatttttgtgttattttttttttttttttttttttttttttttttttttttttttttttttttttttgagataggattttaatatgtcgtttaggttggagtgttggagtgtagtggtatgattacggtttattgtagttttgatttgggtttaagttatttttttattttagttttttttgtagttgggattataggtaaatgttatttggttcgttaaggtggatgtttgtttagtttagtttttaagtttttagaatagttttttttaattaggttttatgagaattaattttttttttttttttttgagatcggagtttcgttttgttatttaggttggagtgtagtggtataattttggtttattgtaagtttcgtttttcgggtttacgttatttttttgttttagtttttttaggagttgggattataggcgtttgttattacgttcggttaattttttgtattttttagtagagacgggattttatcgtgttagttaggatggttttgattttttgattttgtgatttgttcgtttcggttttttaaagtgttgggattataggtataagttatcgcgtttggttaagtttttttttttttttttttttttgagacgtagtttcgttttgttatttaggttggagtgtagtgttgtgatttcggtttatcgtaatttttattaatcgtttaagcgatttttttttttggttttttaagtagttggattataggtatatgttattatgtttgggtaatttttgtagaaatagggttttattatgttggttaggttggttttgaatttttgattttaagtaatttgttcgttttagttttttaaaatgttggaattataggtataagttatcgtgttcgtttagaattaagttttaatgttttttttttttttttttttttgagacggagttttattttattgtttaggttggagtgtagtggcgtgatttcggtttatcgtaatttttgttttttaggtttaggcgatttttttgatttagtttttcgagtagttgggattgtaggtatgtgttattatatttagttaatttttgtatttttagtagagacgggattttattatgttggttaggttagttttaaatttttgattttgtgatttgtttatttttgttttttaaagtgttgggattataggtataagttattgtattcggtttaggtgaaatattttaaatatggtttagtaaatattgtttgatttttttaagtagtttttaatatttatatattttttatttttttttttgtttatgatttttagttttagttaaaagggttagttggttttttagttatgttatgtatatatttgaatttttgttttttaggaagagtatttatttttttttgtttgtttgagttttatttttaaagttagttaagtttagttttttttttagaggttatttttatttttaggttatgtttttatttttgtttatgttgtttggtatataatttagtttttggtataagtggtgtttagtgtttggtggtggtgttgataattgaggttgggggttaagataggaagtttttgggatatttgggtttttgggtattgttttaagggtttttttttttaatagaggttttttttattggaagtaaaggggaatatagaattgaagagatttttgattaaggtttttttttagttgttttttttaggaagtagatttaagaggaggtttgattagatggaagatggtttggagtttgagaaggtgagttgggtatggagagttgtgtatgtgtgtggggggtgtgtgtgtgtgaaagaaaggagagagagagtataaattattagggagggtgattatggattttgtttttatttttttttagaaacggataagaggtttgggtgtaacgattaaaattattatattttatttaagagttttattttttattatagtgttatagatataaggttagattataggtgggtttttaggatggatagattttaaggatatggaagtttagtgttttttaatttatttgtttttttttttttaattttattttattttttttgagatagagtttcgttttatcgtttaggttggagtgtagtggtttaattttatttattgtaattttttttttttaggtttaaacgatttttttattttagtttttcgagtagttgggattataggtgtttatattatgtttagttaatttttgtattttttttagtagagatggggtttcgttatgttggttaggttggttttgaatttttgattttaggtgatttattcgtttttgttttttaaagtgttgggattataggtgtgaggtatcgtatttagtttattttgaataggtaataatattttatttggtttaaaattttaaaggtataaaggttgttgtatagtgaagtttgttttttatttttgttttttagttatttaattttgttatttagggtaattgtgtgtttttttagggaaattttattggtatttaagtaagtaagattatatttttttattttttttatataaatggtggtatattttagatatggttttgtttttatttattttaatttaaattgttttttggtatatggagtatagttggttttttgtattcgtgggttttgtttttgtagatttaattaattatcggttgaaaatatttaaggagagtgggtatagtggtttatgtttgtaattttagtattttggggggttaaggtgtgtagattatttgaggttcggagttttagattagtttggttaatatggttgaaattttgtttttattaaaaatataaaattagttagacgtgatggttcgtgtttgtaattttagttattttggaggttgaggtaggagaattgtttagaatttaggaggtggaggttgtagtgagtcgagattgtgttagtttggcgatagagcgagattcggttttaaaaaaaaaaatgagaaaatatttatggaaaataaaaaataaaattaaaaaatatagtataatagttatggttatgtgttatttggtaatgtagatatattattagaaatgtattattgtggaaatattatagaatgtatttattgaaatttagatgatttagtttgttatatatttaggttatttgcgatagtttattgtttttgggtaataagtttgtgtggcgtgttattatattgaagtatggtaggtaatataatatagtggtaattatttgtgtatataaatatatttaaatatagaaaaggtatagttaaaatataatataaatgataaaaaatggtatatttgtatagggtattaattattaaatggagtatgtttgaatggaagttgttttgggtgagttagtgagtgagtggtgagtgaatgtgaaggtttagggttttattgtatattgttgtagattttagaaatatggtatagttaggttatattaaatttataaaaaatagtttttttataataaattaattttagtttattataattattttattttataaatttaatatttttttttttatttgttaaggttgatgtaatattttaatttttttttaatttttttttttcgattagttgttaaatgattttttattgaaatatttttttttgtgtttaattagttgggtattttatagtattattgttgatgttatttatgatgttatgagggtggtggttattaatattatagtttatagattgggtagttttcggaatttttttaatggttttagagagttttttggttaaggatcggtgtcgtatttgtcgagtaatgttgacgattttattaaaagtgatatttttattgtgtttaatgtttttttgtttttttttgttttttggtggttttttgagggttttgatgatcggggtagaggtagaaggtattattttaatttgggtttgtttgtttttaatggttagttttattgtaatttttaggtttttttagttattcgttgttttggtaatgttattattaattttttttggagatagatttagggggtcgattttgggggttagggtagaagtggtatcgattttatttttggtgtattttaggtatacgattttgatttcgttggggtcgaatttcggtggtatggtggaggtagttggtgtcggatgaatttagatttaggatgatcgaagaaagttgtattttggtttttttcgagtcgaaagtcgagagttttttttttttttttttttgagatggagtttcgttttgtcgtttaggttggagtgtagtggtataatttcggtttattgtaagtttcgtttttcgggttttcgttatttttttgttttagtttttcgcgtagttgggattataggcgttttttattatatttggttaattttgtttttttgtatttttaatagagatagggttttattatgttagttaggatggtttcgattttttgatttcgtgatttgtttgttttagttttttaaagtgttgggattataggcgtgagttattgcgttcggttaattttttgatttttgtaataataattgaaaatataaatattgtatagttttatagaaatattttatttttttatatttttattttttatgttttttttttatttaaattttgttttgggcggggagtatatatttagggtaatatgaatttttgttttttggtttgaaaataaaatttttgttttttgttttttgtttttgagatagagtttcgttttttcgtttaggttggagtgtaatggcgtgatttcggtttagtgtaattttcgttttttgggtttaagtgatttttttgttttagtttttcgagtagttgggattataggtgtgtgttattatatttagttaattttttgtatttttagtagagatggggttttatcgtattagttaggatggtttcgattttttgatttcgtgattcgttcgttttagttttttaaagtgttgggattatagatatgagttattgcgtttcgtttgaaattttttttttaatttaaaattttatttatttgtattttttttaagaaataagtttaaatttgaaaaattttaaatattattttgttttttaaattttttgttaaaaacgaagaaatatatatattagtttaggtttatatagggttaggattattaatattattggtttttatttttatattttgttttattggaagatttttaggggtagtaatatatatggagatgtgattttttgtgataataatgtttttttttggattgtttttttttttttttttgagacggagtttcgtattgtcgtttaggttagagtgtagtggtatgatttcggtttattgtaagtttcgttttttgggtttatattatttttttgttttagttttcggagtagttgggattataggtgttcgttattacgtttggttaattttgtttttgtatttttaggagagacggggttttatcgtgttagttaggatggttttaattttttgattttttgatttgtttatttcggttttttaaagtgttgggattataggcgtgagttatagtgtttggtttggaatgttttttgaatgatatgtttgaggttgttttatagttaattgtttttgtaaatagaaggagtatattttaaaataataataaaaagtatagtacggtaaatatataaattagtaatatagttattattattattaggtattatgtattatatgtaattatatgtgttatatttttatataattggtagtgtattaggttcgtttatattagaattattataaataggtgaggaatgttatgatattattatggttataatgttattaggtaataggaatttttagttttattataatgttacggggttattgttgtatatgtagtttgttattgatcgaaatgttattatgggtatatgattgtattaatatagtatttatattgtgttagatattataagtaatttaaagatgatttaaagtatatgcggttggatgtggtggtttacgtttgtaattttagtattttgggaggttgaggtaggtagattatttgaggttaggagtttgagattagtttggttaatatgttgaaaatttgtttttattaaaaatataaaaaaaaaaaaattagttaggcgtggtggcgtttgtttgtaattttagttatttaggaggttgaggtagaagaattgtttgaattttggaggtggaggttgtagtgagttgagatcgcgttattgtattttagtttgggtgagaagagtgtaattttattttaaaaaaaaaataaaatggaggttaaggtaggtagattattagaggttaggagtttgaggttagtttaattaatatggtgaaatttcgtttttattaaaaatataaaattagttgggcgtggtggcgtatatttataattttagttattcgggaggttgaggcgggagaatcgtttgaattttggaggtagagtttgttgtgagttgagattatgttattgtattttagtttggataataagtgaaattttgttttagttaattaataaataaagtatatgggagcgtgtgtatagattatatttaatattatatatttatttatgtaagggatttgggtatttttggattttggtatttttggggggtgttggaattaattttttttggatattgagggatgattgtaatttttggttttaggggaggtattattaggagttggttagatttagggataagggaaggaagttattttatttttaattttgagaaaagtattttttttgtttttgttttagtaagtgtatatgttattttaagaatgattattttatttttgtttttttttattttttgggtagtttaaaaagtttttaagaagataggatttcggtgttttatagttattgttataggtaattgtgtttaagagttgggtttgagaagggatttggggtatgtgtaaagggagaatgatggaggtggagggatattggttttgtaatttttaagttatttttttaattttgtagggttgaagaattagaagttagtttttgttgtttttgtttagaagtttggtagtaagtgataaatataattattgggtgagaggttgggatagggaagagaagatggtgagtgattagaaaaatttatttggtttttaaggggaaggagatgtagtattaggtgtggattttataaaggttagaagggaggagggatagagagtttagattttattgatttttgttttttttgtgtttattttagtattaggtgttttttttatggtaggagggaagaaatttagtaaacgtttagtttgggatttaaagggttagttatgtgatttaaatgtagaattaaaacggtgtcgtgagaggatttaaacgttggattaagagaattagtagttttaggattagtttagagatgtttagtagtaggttaaggttttggggatagagcgtataatattggaggggtatttagttaaggtataggtttaggttgagtagggttaataggagttgaagaatttgcgtgtttgtgttttggagttggaagagcggttgagtacgtaggagggtttggtgtaagagttttagaaaaaataggtggaattgtaggaagaacggaggggattgatgttttaattagaggagaaggaggtaagggttagatttttattagatgttagtttcgtttttttggtagaggttatgtttttttttttttttaggtattttttaagtttgggttgagaatttttgagtatttatttttagtagtataggtgttgttgaagatattttttttttgatttgtttgtattttagtttatttttgattgttttgttttttgttacgtttttttttatttttgattgtttgtaaagtttttatttagatttgtgttttttttagttttttatttttttttttttgggtttttattttgattataaatttttgtggtattttttttttttttttttatgtttatttgatttttttttggtgagtattaattagattaagttatttgtagttttttaaatgatttaatttttatttttgggtattttgtatatgtgtttttttttttttggaatgttttttgtatattatatttttttttggtttatttttgtatttttgggtgttattttagatattattttttttgtgtttttttttgtgtttggatatatttatagtattttttgttttagtattatgattttttatttttttatttttttttgtttattagattttgaggtttttttgagtagggattttatttttatttattttatacgttttatagtttgtttttttttttggttgtattttattttttgtgtatgttgtgtttttttttgggtagaggaggttgtagatattagaagtagttttgttaagtagttaagtagaggtggtatttttgcggtaggagattgtggtttaggtagttttattgattgagcgggaagaacgtttttatgggttagaaatggagcgtcggcgattgtataattagttgtaggaatttaagggtaatattcgtgtattttgtcgggttcgttttgttttgtcgggggagtttattttattttttggtttttttttgtttttttttggttttggtgggttttttgattttttaattcgttttagtttttttcggtttgacgagcggcgtgggattttgagtggggtattagtttttttaattcgttatgattttttttttgatcgggtatttttattaggaagtggataggatgaagtgtttgaagagattgttatgtttgtttagttagttttggatggttatttagtatgtatttttgtttatggttagataggtagtggtaagatttttataatggagggtgggtttgggggagatttttagttggaggggttgatttttcgggttttgcggtattttttttttgtggtttaggagttgagtggttagggttggatttatagttttgtagtaagttacgtagagatttataatgagattgttcgggatttgttggttattggaattcggaagggttaagggggcgagtgtgagattcgtcgtgtagggttagggagtgaggagtttattgttattaatgttcgatatgtttttgttttttgtgagaaagaagtgaggatttatgggtattggaattgggaaatggggaggagtgggtagggtgttacgagatggaggtagagggagaaaggagtaagagagaattgaaggatgaagtgtaagttattaggttgggttattatattcggttttggtttgtgggttgtcggtagatttgttttaatttgggagtggcgagggagtgatgtatttgttaaaacgaggagggttattatattttatgttttatttttttgtttagtttattttagttatgttggttttttggttgttttttaattagttagtcgtgttttttattttagggtttttgtttggatgtttttttttggagattttggttattttgttaaaatttgtgttttttatttcgtttttatatattttttattttatgtattttttattatttttagatatattgtgtattttattttgttttttgataggttagaaagttttaagagggtgggggtgggtttttatttatttttatatatattattatgtattgatttttgtttgtttttttgttttttttgtttttatttttaggtggacgttttgttttatttggttcgttagaatcgggttgtggttcgtatagtttagaatgaacggttattacgtagttatagtgtattttagttatagatttttggggagtattttagtcgaggtttgtagtgtggggttttttttagttttgtggatttggtcgggagtgagcgatttgatttcggtttagttttcggtttcggggagcgggaacgttttcgggaaatataggttattaatagtagtttgtttacgttggggttggttattatggttttgagtaataaggtgggaatgggagtggggtgagatacgggatttgggggatagttggggttggttgtgtagaattttgtttatttttaaatatttgtttttattttaattatttaggagttttacgtgttttatcggaatagtaaattgatttatttgttgtagaattttttgggtggtagtgttaagatgtgagtgaaagggatagatggaaggggttaggtaggaattgtgttggggtgaggggtagaaaggggaatagtggagatttgtttaggttttgttggtttttaatgttggggttgggtatattgtttttttataggtttatgtttgtgaatatttttttattggaagagaacgttttcgagttttttaattttttacgttttgtttttaaggtgcgattattattcgttagttttgttaggattcgtgggtggttgtaggtttttttattttaattttttttgttttttagggtagggagtatatttgtgtagaaaggttttgtaggtatttgaggtattgtttatttggttttatttttaattattagtttttgagttaagttttttaaaaaacgggtgattaatttaatttgagaaagttgattaaaaaaaaaagaaaaggtgattaaaaggtttaaattggttgggcgtagtagtttatgtttataattcgaatatttcgggaggttaaggtaggaggattgtttgagtttaggagtttaaaattagtttgggtaatatagtgagattttgtttttataaaaaataggaaaattagttgggtgtaatggtttatatttgtagttttagttatttaggaggttgaggtgggaggattatttgaatttgggaggtggaggttgtagtgagtcgtgattttattattgtattttagtttgggtgatagagtaagattttgttttaaaaaattaatatataaaaaatttttaagatttttttttattagtatatagagattattatttttaggtttgtttagattttattatgtagttgtattaaaatttatttattagttttttttattggatatttggattgtttttatatttttttagttataaataaggttacgttgattaattttgtatatatattattttgtattttttagttatatttaattagggaaatagtttttgaaatgggattattggattaaagatttagaggttttttagattattttaaatagtgtgaatttagattttaaattttatgagggttagttagtggttatatgaatttttattaatgagaattttttttattagaatttttttttattagtgttaagtaagttagaaagtttttttattgtttgtttttatagtaatttttttttttggtatattttttttttgcgcgtatagttttttgatgggttttggttttatttgaggtttgattaggtttgttttgttgtgcgtttgggtttttttttagttagtattgattgttgttgtggagtagttagtatttgtattttgatttggtattttattttgatgagggttttttttattattttgtaagtttaattttagagggtggtgatgttttttttaattttttattaatgttatattaatgtaatatttaataatatgaattttaatattttttaatatttagtttatgttaaattttatttaattgttttagaagtgttttttatatataataggtttgtttaaattaggatttaggtaagggttatttatttggttgaaatgttttaagttttataattttattttatattgttattattatgtcgtttgttgaaggttatttgttttatagaatatattattttggattttggttggttgtttttttttttttttatatttttatttatttattatatttgggtgttgttaatttgatttatttatttataagttttttattgatttttttatttagtgattttatttagtagtgattatatttggatttttattttattaaggggtttttaaatggggatttttttaattttagttgttttgtattggttagttacgatttttttatgaagatatttgttttgttatttatttggtttttttgaaatttaatttatataggaaaaataagataaatgttgaattatttattgatttttagtattgagttgatattttagtagtttttaaaggtgattaatgaatgtttatttgagggttatttttatttttattttttttgagatagggatttgttttgttgtttagattggaatttagtggtttaattatagtttattgtagttattaaaagtgttgggattataggcgtgagttatttagttcggttatagtcgtttttttttttgatgtttaaattgttttatttttagttaataggaattttttggtcgggcgcggtggtttatgtttgtaattttagtattttgggaggttgaggtgggtggattacgaggttaggagatcgagattattttaatacggtgaaatttcgtttttattaaaaatataaaaaatttatcgggcgtggtggcgggcgtttgtagttttagttattttgggagtttgaggtagaatggtttgaattcgggaggtggagtttgtagtgagtcgagatcgcgttattgtattttagtttgggcgatagagtaagatttcgttttaataataataataaaaaaaagagttttttttagattggtgttagtgttttttagatagaattttagtagtttttttagatttaatttgtatatttttttttttagattttaattgatttattttttaaggagttttagtttttaaatgggtgttattattattttatttcggtttaagtgttttatagtgggagaggttggaggtttttagtatagggtattgttggaaatgaaagttttttttttttgtttttgtatttttttttggggtttttatttttttttaagtttttttattttttttaaatttagtgtgtagaggagaataaattataattggtattagtttgaattagtttttggaggttttatttcggtatttttgagggtagttttagtattggaggatgggagattttgggaaaaatgttgtattggttacgttgtaaatttttattttgtttaattttttgtttttaggtgaattagtgtgttattggtattgtttaggttaataggaagtgaagacggatttagatttgtgtgtgtgtgtgtgtgtgtgtgtgtgtgtgtgtgtgtgtgtgtgtgtttttatgtttatgtatcgggtgaggggtgggagggttgttggagggtgttttattgggtggagggtattatgttttagggttattaaataaagaatagtttggttttttttttaaataaaggttttattagtatttgtttaagaaggtagatatttttatatttgtaaaagtgggagttgtgatttgtattttttgttaaacgtttacgtgggaggcgggagcgggggttgagggtttcgtttttttttttttttgttattatcggttttggattttggtttggattatttttttttttgttaatattttttatttcgttcgttatattagggaggtgtgttttttagttatttacgttttttttttggttattagttataggtaatttttattttttcgtcggttattttagttttagggaagaacgtttttttggtgggtgtcggtaaatggggatcggattttagagtttagaggcggggttagcgcgcgtttttaaattgttggtttttttttttcgtttcgttttttttttgttttttcgttcgaacggttggggttttgttcgttcgttgtttattggttggttttcggtggcgttatcgttttgggttttcgcgtttttcgtttgcgttagttttggaagtacggggcgggacgtttacgggaagcggcgcgtacgttcgtcgattttttcgcgttaatcgtcgacggtcgtcgttcggtgaaggaggggtttagtttttttaggtgtcgcgcgtaggaggggatacgcgtgcgtaaaagggcggtgggtggggcgcgattcgttacggggagggcggggcgcgcgagggaggagggcgtggtgggggtatcgagaagggtgaatggagggcggggttgtgaattggggtcggggggcgggatttggagtgattatggggggtggggtagttaacggatgtggtatggggcgggggattaggtcggaggcgggttgtcgggaggggggattttttcgtgttttaagggcgaattttaggtcggaggaaggggttgaggggatttttttttttatcgggttcgatttttcgttttttaagtcgcggagggttagtttttttttcggcgttttttaggtttgttggaggtgagggaggtggggtgaggtggtgttcgttttttttttcggtttttttttttttttagttttttttttttattatttttttttttaatcggttcgttttttttttttttttttttttttcgtcgttttttttttttgtcgttgtcgttgttttggttgttgcgttatacgttttagagtcgtcgggacggaggggttgggtttggggatttttcggttttcgtttgtacgtttttttacgttcggacgtgtttttttcgcgcgggggattcgtttaggttttttacgtttgtttttgttcggttttcggcggttttagttgttatcggtaaggaggcggtaggaggcgttggtggggggtagggagtcgggggtcggcgcggggcgcgggcgggagagtttcgtcgttttggtttcgggttcgggttgggtcgatataagttttttttcggatttgtcgttttggggagtagagatcgggattgggatacgtttttttttcggggtatttagagaagttgtttaattcgggggtagggagtttcgaatttgagggtgatttgatataatttggtattaggatgattgtttttaatgagacgcgtaggtttggggagatagtcgtttttgttttggaaaatatttttagaaaaggttttaaaatacgtttttgggtaataggatattttaattatgatatttttaaattgagtagtttttgtttttataattataattttttttaaaattttaaggttagtatataatattttaggagagttttggaagttgggaaattagtaattaggtttggggtcggggggagggttgttagttatcgagaggagagttagttattagagttggaagaggatttaaaaagttggtgatgggtgtttagtggttttttattaaggtgttttagggatttggagatgggggtatagatattttatttttgatggtaaaataggtaaagaaaatggggaggttggtcgggttcggtggtttacgtttgtaattttagtattttgggaagttgaggtgggtggattatgaggttaggagttcgagattagtttggttaatatggttaatattttatttttattaaaaatataaaaattagttaggtatggtggtatgcgtttgtaattttatttatttgggagattgaggtaggagaattgtttgaattcgggaggtggaggttgtagtgagttaagattgtgttattgtattttggtttgggcgatagagtaaaattttattttaggaaaaaaaaaaaaaaaagaaaaagaaaatggggaaggttttttagtatttataatttttttttttttattttttttttggttaggtttttttaggatgtaatggcgtagttttttcggttgagtcgttttggtgtttttttattttgggatttagttttttttgtttttatttttggttttaggtttcggttttgggagggttaagatgtgttggttagatggattgatgggttgttatatttgggtattattaaaaaggtaagattttttatttttgattttttttttagtttttttatttaattttggtttttattttattttgtttgtttatttattttaggtggatagtgttagggaggtgtgtttggtttagtttgaggatgattcgtagtttttggttttatggaaagatattagttttggtaagattttagagatttgagattgtatattttatggaaaataaatttggtttagaggggtagaaagagatttaaaggtaggttttgtgatattgtgtttttttatagttgttttttttggagaggaatttttttgttgtgtttgtcgttttgagattgtggtttttgggaatcggttggttagttgtgagaagtgtcgttatggtgagagggtaggttatttgaatggtttagtttgtttttttttttaggatggtttttatattatttgttttggttttagtttttaagttattgttttggttaggttgtttagttttattttagtttttattcgtttttagtttagggagaagtagttatggaaaggggtggtataatttttgtaggtagaagatggtttaaatgtatttttttttaattatatgatttcggataagttttttaatttttaggagttttagttttttgatttgtaaaataaggataatgtatttttttattaagattatggttagggattaaatgagatgggtaaagattatttttgttttaatattaagtatatataggtatgtaataagtggtttattattattattgtagtttattattaggattgttatgtttttagggttttagtttttggagagggagagggtatattttgggtatgtcgttagtgtgtttttgcgatcgttattaaggtaaaggtatttttttgttattttttttgtgggagttttttatttatagttttttttaagtttttttttttttttatttttttgaagttatttatttgttttgtttttgtagaggggaggtgttttgaagaagggtttttatgttcgggttatgttgggtatgaagttttttttgttatatggattgaaggggttggattgggatgttggatatttgagtaatcgatagtagagttattgttattgtggtggttttggggagtgagtaatgagaggggagtagattgtggaatgaatgatgtggtggtggattttaggaaatgaaggaaaaagaataggatgagggtagtatttagggggataggaggtaagtttagggtttgggatagttatggggaagggggtttttggaggttagaagttttgtgtttttttttaggtggaatttgaaaatgttgtagtgtcggagttgtttgtagtggttttatgaggtttgtatttagtgtttgagtaagttttttttttatggggataggtgagattaaggtagattttttaggagttaaggatgtttttttttttcgtgttttatttttagtttttttacgtttttttttattttagtttttttttaatttttgtagcgttattttatttgtttgtttcgtttttgtttgtgagttttttaggggatggtatagtttttttgtgtaagtgtgtttgtttttttttgtttatgtttaggttttatgaatttgaatgttgtgtgtgtcgcgggggttttgagaaagttcggagattatagtttcgttggtgagttggattgggtatgattttagtgtaattttatattatagtattttattttatatgttttaattttttattttaggatttttttggtttttaaaatgtttttgtggttttgaaaattttgtttttttagggtggatgtggtttattttgttttgtattattttagtgtttgttgtaagaagaaatattttgattttgatcgtgagatttttttttttatttttgagaattgggatagtttgtttttgggggaggtaaggggtagtgtagttttgggggttgggatgggatagggagatgtagcggaaaggggaagagaagaaattattgtttttttggttttatttttttttattttttttagtttttagatatttttaaaggagaacgtttttttaagtttttttttgtttttaatagttataaggatcggtgagttggagggaagaggaggtaaggatgaggttcggaaagagatggagagtggaagtttggaaggggaggggtttgtaatttatttggaagattgtgattgaaaaggattgaggaatggcgtaaggaggaatcgttttttatagtattgattttatattatttttttttttgttttagttttattttagggagagagattaagaagaggaaatgtttgtttggtttttatgttcggatgtttttttttgtggagttttttattggagatggagtatttattaggttattggtttaggggggatgggggaaatttttagggtgttagttttggggggtatatgtatagagatggggaggttttgggggtgttcgggagggggttggggggataaggaggttttttatagtttttttttagggtagggttttgggggaggggttttacgttttttggggaagcgtcggaggtcggagttagagtttttgaggaggaggtagaaggggaaagtggaggagttggggttatttttagtagtgcgtaattagttcgagttttaggagtagagggagcgggtttatttgtagagggtattgtaggtattggagtagggggaattttatggagtaaatggtggggtgtgggaaggagttaaggattattttttagttttttgtttttttttttaggttttagtgtttttattattttttagttttaattagagttattagggtagtagcggttataattttcggtttatagatgttcgttgtttgtttaggttagtgtttttttgttttttttttataaaatatgtttttaattatttatattttttggattttattatttagaattttttttttttttttttttggttatttattttttggtttagatcgatttttagaattagtgtttggtagttagtattttggggaagggagttttttgggggtagtgtttgagttttgtattttttagggggagaaggttttgtttttttgttttaggttttgattttttttattttaattttagtagttttattcggatgtttgtttttttttatttttttgttagtatcgtagggatttttggggatagtggatttttagataggtgagattttgttttttattattagtgatgtttttttttttttttatgtgtttaaggtttttagtttttaatattgtttttttgatttatatgtgttttttatttttgtttattttttataattgttttttttttttaggttatttttggaattttatattggtttttttatagatatttttaaaagtgttttttattcgatgattgttttattttttttagttttatttttatttttaggtttttttagacgtttagtattttttttttttttgtgtcgtagtttgttttttgggattgggggaggagttcgaggtggggttggttatttgtttcgaggggattttgttcgggtttttgttcggagagtacggtttgatggttttgtgtagtatttggttgagtggggaggagggggtattttttgaatagtttgtttttgtttagttttttatttatatatatcggtatttttatattttgatttttgattttatttatagttgggatgtatttggagagatagggggtagttttttttattgtttaggttggaatttaagagtggggagtggggaagaggtttttttttttatttttttttatgatttttgattttttttattttttttattttttttgatgttattttgttatagttttttaaatattttttaaaattatttaatttttgggggtagagattgaggagggaggatgataagggatttcggattttgtatgattgaaataaagagaaataaataaatttagtagttttgagttattttgaaagatgtagagaatatagggattagaagtatttatatttttttaataaatttgtatatatgataaaaaataggtaaaaggtagagagatttaaagacgggatttattgggggtttagttattatttggaagttagaaggcgttgaagtatcgcggggatttttatgatgagtaggaatagggtttattatggtaggattgtgatagagttagaaattgattttgtgatttggcgtatttattgtaggtacggaaagtttttttgttttataggtaatgtaattatttcggttatttcgtaagggtgtatagaattataaaataggtgggtgggggaaggggattatttaaagatttatttaaaagaatttatttttttatacgtaagttttagattgtttagtaagttatatttatatagtatatatttttattttatttattttaaagtttttatcgaataaaatttgttaaagttgggattaaggaattttgggttttaattatttaagggataaagataaatatggttgaattaaggagtgggattgagtttagttttttagaagaggggtaagggttaaaggggttagggattggggatattttgttgggtgggggaaatgttttttattattagtattttattgtttttttcgattttttttttttatttatagttgaaaggttagagggggagagttgtggggagtaaagaattttttttaggaaagaggtttttagttagtttttatagttaggttaattttttaatttttatgatttatatggatgtaatttgagggatgaggttgacgtaggttgttaggcgtttttttattacggttttggagtgaagagatagttttatttagagtattttataattttagtttttgtattggtagtttagagataggtttttagagttggagaaaggagaaagtagtatttttttgttttatttttaattgtttttttatgattattttttttcgttgtatatcgaggtttttatttggcgatttttttggcgattttttcgttggggtaagtaataaaggttgtagagatcgagttcggaacgtagttagagtcggaattcgaggtcggcgagggttgggtcggagggtttttagaggttatggttagtaagattcggggtagtaataaaaggcgggaggttataggtagtagcgtcggtatttaaataaaagataggagtagagaggtttgagagtaggaggcgaattcgatttttttttataaatagtttaggaaattatattcggggaagttttcgtttagatttttaggttttgttttttttttgatgtattttcgaagaatgtttttgaaggtgagagagaaatttggaaaataaagtaaaagtttattttatttatattttagggggttaatttttgggatttagggtgcgggtagcggtcgaggtttcgaggatcggaaggggcggggcggggtcggttatttattatttcgtcgagtaggatcgcgggagttcgttttttatttatgcggtttacgttggtataggagagttgattttaaaggttatacgttatacggagaaataattttaggaagagcggtttttttttatttgggtggtagttacgtgattagaaaatagcgcgtattatgtgatagtagaagaaggattatttgcgtttttagagttagttaatttcgattttattatggcgcggtttgtttattttttgatgaaggaggagttatgggagatttgattaatcgattatcgtatttgtagacgtgcgcggaaatggtacgttcgttttcgtgtgaattcgaaattgttatttgttggttgaggagagtcgttgcggcgttttattgttacgtgagggggtcggtttttttcggcggcggtatttagtgagtgacgttaagtggttaattataggttagtttcgtaggttacgtgaggcgagagttggttttaggaaaggggggttagagatttcgtagagtcgatgcgttaggttgtggagtggggaattatttttaaattttataatgtgtttagtgattttttttgtattgttttcgaggttttaaggagtgggagggtttgagaaggattttttattttaaatttaggggttaagagagcgttttttgtttttttagttgggtagagatatgtttgggtttgggaatgaataacggtgatttagaagttcgttgtttttgggtagtagggagtgattaggtaggtacgggtatggtaagataatagttagttgaggaaagaagtattttaaaatagagcgagattttgtggtagaggatggtgaaaatggggtttagttattttaattgaaaatttaaagtttgagatagattattgaattagagggaaggagaacgagggttgtaggatggggatagtggtgatggtttttttgtttttttttttttgtttattttattttttaggattggtttattttttagtttcgggttttttttttttaatttattttttaaggagttaggatttgttttatataatttttttggggtttaagtatattttgtgatttaaaaatggagagaggggttaatgagaggtagagaggtgggaggaggtgtagagaaaaaagtttttgttattgtttttatttaatattttttttttttttaaggtttgaggttattggtttggtggtggggatgtttcggagttttttaggttgacgttagggttatatttttcggaggttttagggtagggaagtggggaggggaggttttttgagatttttgtttttgagtttggagtttgtttttgagatagatttcggaggggttttttagtatttgtgtggagattttttttaggattgagtttttttttatgtttttggtttggggggtttttatgttttagggtttgtggtcgtattttgaggtttttcgaagttttttttatgaattttgggtttttgagttgtttattttcggattagttgaagtttttatttttttttaagttaggagtgtttttgtttttaagttattagtttttgagatttgagtttggggtttttttttaggtttgagttttttaagttttaattttatatttggttttttttgaatttgggttttatttttttttgagtttaggttttaggttttggtttttgaaattattattttagggtttggagtttaagatatttgtaggtatggagaattttttttagattggatttttagattttgatattgagtttttttttttgggggatttggggtcgttttttttttaaattaggagtttttttttttttagattttggttttgtgttttaaattattttatagtggggggtggtgaagtatttttttttgtgggtttagggtttttttgttttagggtttggggtttgtatttttaggatttttgtttttttttggtgtgtttttgagttaggggttttttttttttttataatttgggtttttcggagtaggggtgggggttgtagagttttttttttttttttttttttttgtttttttcgttttcgttcgttttttcgttttttttttttttcggttgtcgttgttgtcgttggtttttatttttttttttttttttttttttttttttttttgtttttttttgttttttttttttttttttttttttttttttttttttattttttttttttttttttttttttttttttttttttttttttttttttttttttcgttttttcgttttttttttttaggtttgatgagtaggtttcgagtttttatttatcgggggagtattttcgcgatgttttatgttttttttagaggtacgtggtggggggagggggagggttatatggggggtaatagggggaggggtagggggcgggggagagtcggggtcgagggaagggagcggttgaaatggagggagaggggaggatcgggaaggtaggggtgggagtaatcgggaaggagggattggaggttagagggataggggtagataagggatggaggggttaggaaatgggttttgaaagggggttgaagggaaaatgatgaaggggaaagaaagcgttagaaaggggtgggaaggtagaaggattgggttggggaaaaagttgtagaaataatttgggggtgggagttgagtgatgaggaaaatattaaggaaatagagggatagagttttgggagaggggttaggaaggagaaatgaaaatataggggtgaaaagagaagttaagaagatgtggggggataatttggtgggggatttagagtatggtaaggggcggaaaaagagaggaggatggagggagagaaggggttagatggagagagagggaggtagtggggggtggggggatggagggtttagatggagggaagagagaagagagagggaacggtgggggaggggagattagggtagggggagggttaaattatgtgtgtttgggggggtggtagtataagtaagatgaaatgatgggagtaggggataggttaggattttgttttagattttgatttttttaaaggtttttgattagtaaaatgtaatttttggggttttaatgttgtttttattttattatttttattttttttttttatttttttaatttttatttttatttttttttttttttttgttgtttattatttatatttttttttttatatggtgttcgttttttatatgagttttttttttgttttttttttatattagttttttttttggtgtttattgttttttttttattttttttttatgtggtcgtttttttatatttttattatttttttattagttcgttttgatttttttttatagttttcgtattaggtttgttttttttgttttgatatatgtttagtcgagttttttaggtgtatttttttgtttttgggtatttattattatttttgtttttttttttatttatttttattatttgttttttagattattttttgttattataagtttgtgtttatttatttttttttaatattttaatttttattattatttttttttttttgttttttttatttattggggtgttggagatttggggtataaagatataggttttgatgattagaataagggatttttattttagtttttgagggattttttattttagtaaaaatttttcgttttttagttatgttgttttgttttttgtatttgttttttagaattattttttattaagtttagatagtatgtgtgtgtgtgtttttagagttgtttttaagttttttgttgttaggagaaagatgttttttgaagtttaattcgttttttttggttgtagtttgaattagttttttttttaaatgtttatgtgtattaatagattttttttttgggtatattaagtgtttaagtgcggtgggtatgttgtttgtaatgtttgtagttttagaggttaggtattggtgatttttgtatttagagaatattagttagtttttgagatgggttgagatagagttttaaagtatgtggtttttaaatggtggatattttgagggtttatcgtttattgtgatttggaggttgggtaaatttgagagatatatttatagatagaaaagggttgaatttgtaaaattttgttatttagtgtattttgttggaatgaagtttaaagattagtttttttgtagtatatttatggttattttataaaggtgatagagtttgattttttttttatttaaaatttgatattttaagtttaatttttagttttttgttgtcgttaatgtgatattttttttattttaatagggtttgtgtggtattggggtttaaaggagaggtagtttgtagggagagcggtatggtaagaataatagagttggggaaggaggattttggttttattttagttataggcgatatttggtttattgttttttttttttaaagttttgtttttatttttagtttttgtttttggaggtttttttgtgttattaggtttggatattttattttttttttttgatattttttttttttaagttttttattgtgttttgagaaggtttttgatttatggagtggtttttattttgtttattgagattaggtggggtgaggtggtgggggtagtgttgaatttttgggtattgaatgggagaagagataaatttggtttttatttgtttaaataagggtatattttttattttttgttttggggtttttatagttagatgtcgataaaagttattttttttttattattagaagaattagaattttttttaaaggatgagtagggttgaattaggggaggagggtatagaggagggaagagttgggaggggaggtttttttatgtttttgattgtgaataggtaagtttttcgatttttttttttttagatatttagtttttagaattttatgattttaatgtttttatatatatattttattttttttttttatagttatgtagttttttttatatttttttatagaggggtggtgttattttttaagtttttgttttttgtagttatttggatgtttttttttatttagatatttgatattaatttttttgttttttttttgttaattttgcggtatttttattttatttttttgaagtagatggagagtttttttatttttttttgtttttaaacgtgtattttttttgttatataatttttatttttgaatttttgtatttttttttttaagtttttagagttttttgtgatgtgatttttttttttttttttttttgtataaatgtttgttttgtgtttttttagagttgttaggtgttttatttttaattgtgattttttgaaggtcggtagggttttttttttattttgtggattttttttttgttattttaggtttttgtttttaaatgtatagagttttttttattgtttttgtgtgtttttgttttttagatgtacggggattttttatgtatcgaatttaatacgtttatttttcgtatgatcgttttggttggaattttcggttttgtattatttcggggaattagttgtttatgttggatgaggatgaggtgagtgtggtgagaaggttgggaaaacgtatgtgggagaatggggagagtttttattagtgaaggggagagagatataaagaaggtagataaagaagaaatatttgtaaatggtaggagggtggttattgagatttgggttggagtgtgataagaggggtagttatttttttattttgggtagggagtttttgagggttatgagttgtgttggggaggagatgtggttttgaagatttcgggggtggggaggtttttgtttttatattgtttatattgtaggataggttagaatggggaaggggaattgaagggtttggagaaggggtgaagatatggaaggtttttttaattaaagtaatttttaggatttttttttgttttgtttattgagtaagatttttagttttttttttattagggggtagagtgtaagaagagaaattgtaggacgtagagaaaaggtaggggatagaggaggttttaggtagttggaggatattgggaaagaagattgaggttagtggattttggtatgatggggtgaagattgggagagtgattgagattaaggtttagagagatattgagagggtttttgtaagggagtggttggatattaggaaggaatataagggaggggaattgggagtatgtggagttatttaaaggagtataagtggagtaggggtagggattagttagagtaaaggagatgaaacggatagaggttttttatgggaggtggtggttaggtatggagatttgagagttagggaagtgtgggttttgatttgggagttgggttagtaggagtgtttattggaggaaatagaggataaaaattggaatggtgttttataagtgtgagttagggaatgggggtgatttgggggataagttttaaaaaatggtagggtagtttggaaaattaaacgtggtgagagatggattttgaaagttattgggaatggtgtgatgaggaagggttagaatttgagttagggttaattagagtgttaagggatttatgggggtaggtgagagtgtggagagatggttgggtagatagtttttaggttatagagtaaagtagaggtgttaaggagaggatatggtgattttgaaaggagaggtggtttggggagtttaagttttggatattattgggagatatttgagtgattgtggttaaatttttagattaaggtttggagtttgtaggagaaatgggggaaattggaatttagagtggggattgttatagggatgaagagggaagataatggattggggtaatgaaggaatgatagagatagggatagattgaagggattagtggttagtaagttgaggggtaataggaatggtcggtttggagtaggaagggcgtgtgtgtgggaggaggagtagatagaattgggaaaatgagtagtttgaatagacgtagggagttggaattggatgggtggtggaattggggttgggggatagtgaggggtttgtttttgtggttttttgtagaggtggaggagattgtaggggtggaggtgtatggaggtagggatggaggtggatagggggagttgggtgtgaagtttagggaaaggtgatggttgaggggaagaagggaattgagagatgttgggtcgggtgatggaaggagatgaaaggtgggggaaggtgattaggttttttggcgggaggggaggttgggttttagtttggtcgtaagtcgggtcgtgggagggagataagttgtggattttgattataaatgtagtttttgttattttcgtgataggttcggagggagagaagggggtaagggaggtgggaggttgggaggaaagtagggagaatggaggaattgaaggttaagggaaaattggatttaggaagtagttaatttttgaggagttgtagaagagttgagtagggtttgggagaatttttcggaaggtgttttaagataaatggagggagaaaagagggtgggacggtaaagaatgagagagagagattgggggagagaagggagagatttagttattaagtgtggaggggtcggggtagaaaaagtgggtaggtttagggggaaaaggaggttcgttttttttgggaggaggcggaggggggaagagggaggggaggggcggcgtgggttagggaggtttgatatatttttattttttttagatatattttttattgattcgggatcggaggagcgagtttagtcgtaataaattgttgagacgtatagttttcgtgtcggtggaggggcggttttacggcgagtatggtacggcggtcgagtaggtttttatgattcggataggcgcggggagagggttgaagatggatcgggttggcggggcgggggcgtcggggagcggcgggagttggtcgggggcgggagaaggcggagataaagttttgtttttcgaggggagatggcgtttttttttggaaggtggagcgggataggggttgtgggtgagaggtttttgtgggttttcgttcggtttcgtttttttttttttttttagtagtgaagtttgattatttttttggtgtttgtaaaaatagtttttttagatttttagtttttagttcgtgtgtttttgtttttgttttttttagtttttggtttgggattttggaaagaatgatttagtttttgttttttttttagattttttttttatttttatgtttttgatttttttttcggatttttagtttttgaggtttttttttattattttttgttttttttttttattagttgtttttattttttgtaattgtattatttttttttttttttttttgattttttttattttttgtattttttttgattatttcgttttttttttttgttttcggcgaaagtttattagatttttattttattttttttttgtttgtagagttatttgcgcggtttgtttttttaattttttttttttttttatttgtttttttttttttttttttttttttgtttttttaattttttttttagttatttaaaaaaagatttttgtttttttgagaagttcgtttaaaaggtttttatgggaatagtgaggggagatgaaggtagagaatagagatttgtagttaaggtgtagagagacgtttttagttttcggaaattttttcgttattgtttttttttattttattttttttttcggatttagcgatttaggttttttatttttttaatttttaggtgattttttttttttattagttttttttttttttaggaatttaagttattagttttttttttttagagagttagtgatttgtttttattttttggttttttttagttttttgataggtttaggttttattagttttgtgggtcggtttggggattttgggtgggtgggtgggtggttagggatgtgtgttattgttatggaaattttatattatcggggtgtgtgggtagtatatttttgtgaggtaaagttaggtggtggtggagtgtatatagagaatgtgtgtgatgtttgttatatttgtgtgtatatgtatatgtgtgtatgttatgtttatgtttggggaagatgtgtgtgtttgtgtgtatgtgtgtatatttgcgtttttaggttagaatggttatatgtttatagagtatgtttattatgtgttttgtggttggtagatttgtttatttattttttatttttttttttattttgagtttttagggtttaggggtttttggcgggggtttttcgtgtgttttgggtggggatatcgtgtgtgtttggagttgaggtggtatgtggaggttgttgtattggggtttagtaggggttgggaggggttttaggggtatatgtatttggggggagggtttagtgaaagttgatgggggtgaacgtttagggtttttaggtagatatggaatgtgtaaagggtatggaggatgtgtagtggatataggggtcgttgggattttggggatttggtaatgttaaggtgtttgttgaggttgtggattttttagttcgggagaggtcgtcggatttttgaggggtattggaattttgggttttttttttgttgggtggagtcgcgaattttcgtttttttcgcggttttgtgtgtgtgggggggttttgtttaggaggggatggtgggtggtttggtttgttttgggggtttttttgtttttttttttcgtttttttcgcgttgttttcgggcgatagggttcgtgatagaggcggttacggtagtagcggtcgtttagtaacggcggcggggttcgggtaacggcggtagcggcgggagcggcggcggagggagtcgttttcgcggtcgttatcgcgcggtcgtttcggtcgtttcgggtttcgtcgtcgtttttatcgcgtcgggcggcgcgagtcgggtcgtatcgtttttttttttttcgtatttcgtttttttttcgcgtaggggcggggttttttttttatcggggatatttttggttttttcggggggcggtgcgaggtaagggcggggtcgggcggattaggagcgcgcgtagaggggggggcgtcgcgcgcgtggggcgggggcgcgcgtgtgcgtgggcgcggggaggggggtggggaagtcgcggtggcggcggcggcggcggtagttgtttttttcgtatgttttcgttgtatttttcgagtggggggagttatggtaatcggagggggatagcggaggacgggagggtcggggatcggtttcgtgcggatagggttttgagtacgcgggggcggtcggtgtgtgtgggattttggagtttttggtggaaggggtagttcgtgtgttcgcgtgtgtgttcgtgtttatgttcgtgttttttgtgtgtcggtgttatgtgtatacgggggtttagtttttcgtgtatatatgtgtagttatttttgtgtaagtgtgttttgttttattttgtttttgtttgttttttgtttagggggttgttgggttagttacgggtttgtggggtagttcgcggttttgttggtttatgttatttttgattttgagtatgtatatttttggttggggtttattttttgttaggtttttgtgtgtgggaatgtgtggttttatgagtaggattttttgtgtttttggtggtaggtgtgtgtttttgtatgtgtgttttagtattggtttgagtatttgtgttaattttagtatgggtgtttagggcgtgtttggatgtgggtggtgtggttggggggagtaagtgtgtgaatgtgttttttggaattttattgtgtatgaaatatttttgggttgggtaggtgtaagttttgtttggttagtaagtggggatagaaaagtttaaaaagggaagaaatggggtaaagaggaaaagtggggaggggataggagagaaggaatgagagaggtttgaagaagagagtagagagtagtaggttagggagaaagaatagttggagaatgggaatgtgggagaaagttaagttagatttagaagagagaataggggataagagtttaagatggggaattggatagagatggtgggagaagaaggggtttgggagttggggaggtagtggggaggagagagttaggttttttggtaaagtgatttttgaaagaagaaagggaagaagatgggagaaggtattggatttttgtaggttttgtaggattaggtttggttttggattagggaaggttatttaggtatacgggttggtttatagtgaggtttgttatagtagggattgttattagaggtttatatttttagtatagagttttgttttttatttttttgttttgtgtttaattttgtttttcgtttttttttggtaattttttttttttggttttttttgagagttgttagttgggtgtggagaggaagaaaggttaaagggaaggttagggatttggagggtagggggagattttgtgggtgatggtaagattagagatgttggaggggtaggagtttaagtttttgttgtgtgtgtgtgagtgttattgtgtgtgtatatagggtgtgtatatgtgtgggtgtgtgtataatgtttgtgttacgggtttgtgtaggtggttgttatgtgtgtgtatgcgtgtatatatcgtgtaggtatgggatatggagatttaggattatagtttgtgttttttaggtttgttgtgtgtgtgtgtatacgggtgtgtgttgttttttttgtatatgttattgtatgtagtattaataataggatgttttgtgtttttgttattttgtttttttttttttttgtgtttttgttattttttttttgcggtaataaaagtgtttaataagtatatgtgtatgtggtttttgtgtatttgtgatttatgagtgagtttatggattttagtttttggtaatatgtgtaaggttatattatttttaagaattaagtaagttaattagtaaatttgtttttttgttaatgttttagttttaaagcggaattttaatgtatttaaagttagattttatgtttttattagatgagtttgtatatgaaaataatggttgagttcggttttttgaaatgagagtgaggtagttatatttgagaaatgtagaaaaaatgttattagggaagagatattttgaattattggatgtattgtttagtgtgtattagaaggataattaatatatttgtttttggtttttttttattttggtggtaatttcggatgtttgtgttagagtgagagaagggttgggggaggaaagggggttgttttgagatagagtggatgtggttgtattttttacgtgaatgaaaggatgtttgtgtttttgagatatggggatatttttttgtggttaggattatggtgtatttaagtatgtattttaggggttaaattggaatttttttgtatggggatatgtgtgttttagggttataggtttatttttgtagtgtgttgtttatatgattgtttaagagatttgggttataaagtttatattagtagtttttatgtgggttattgggtttaagtatgtatttttttgttgtagagtttatatatgttaaagtatgtattttgtggggtgtgtgggttttagggttttagaatgtggattcgtgttatgttcgtgtttatagttgtttgtatgttttaaaagtatatagatttttagttatttttttgtattgtggtttttatatatacgtatttttatagtttagtatatgtttttgtattatatatttgtttttgagggagtgatagggttttcgtgttatggggtttatatttttgtatgtaaattttttaatatttgggttttataggtaaagggaagttgaggattgattttagggtagtttgtaggtaatttgtaattttggaagtagatagtgaaaatataattgtggtttttttttgttttgttttggaatttagagggttaataggtagttttttcggtttatttttttttttttagtttgtagttttttgttgtcgtggagatggtggtttcgtttcgatgtagtatttgtttttttattggttgtagtggtgattgtggggttgaggggggagtttaggtttgggtagttattttggagttggagtcggagtttggtatttttttatttatatttttttttagtttttcggtttttttaaatttttttgtagtcgagttttagtttttttttttagcgtttgttatttttttaggtttttggtagattgagttgtattcgtatttatttttttttttttttttttttttatttttatttgggagtttcgagaatttttattgtttattttttttgttttttgtttatttttttgtattttttgttttttttttttttttattaattttttgagtttttgttattgtagtgtacgtggaatcggtttttttttttttttttttatttgttttttttttggattttttgtttttagtttttttttttgttattttttataggttttttttaagatttttttttttagtttagggagggggttatgggaggtagttttggttttttagatagataggggttttaggaggtggggggtaggtggaagatgtgtttattagggggaagaggaaagtttgtttatgggtaatgatttttaatttatttttttttttagttagttttttttggggtgggtgggtattagggatttagtttttttggatttttggtgttttttattattggggttttattgatttttttagttatgtttttttgttgattgttagttttagttatgggtttaaggttttttattttattttttttagggggtttttgtttaggttttttgttttttttttttcgttgttagttttttcgtcgtcgttgttttttttgttgtttttcggggggtaggtgaggtcggagttgaggggtagagggaggtgggggtatgtattggggttaggggtgggaatttgggttaatagttttttttttggttttttttttaattttttttttggttatttttttttttttagaatattatttgggtcgttcgaggaggaagagtgttttaggggggaagtagtatagtatggagggtgtttttgttgcgttttttcggttttcggtgagtggtgtttattagatgtggtttagttgggtttttttttttttagttttaattggggttttaggagtttgagaaagagggtaggagggggagagagggagtgagagtgagaaaaagagtgtgtgtttgtgtgtgtttttttatttttttggtttttttttttttggttttgtttttttgtttttgagattagtttttttattttttttaagttgtgtgtgtgtgtatatgtgtgtgtgtgtgtgtttgtattgtattcgtgggagtaaggaagataaattggtattagggtttttattttttttttttcgtttttggagattttttttttttttattttatttttatttaggggttttttattagttgagggatgagtaggtagaattgattttgttttaatttattttatttttattttttttttagtaaggttttttgagtcgacggttaaaaagttttattaaacgaacgaagttataatttaaatttgatcggattagtagttttcgttagattttgtttcgttttcgaagtgttgattatgatcggtataggggttggagtatgtgggatgagattgatgtaatgtagggttttttgtgtgagatgtagagggagggggttatttgtgtgtaaaggttgaaggatttaatttaagttggttgggggatgttatggtataggggatagaatagaaaagaattagaatagggatttgtgagtagtaggagaggggtagggtggtagagagaagatagatagataggttggaaagggaatgaaggtgaagttaaggagggattttttagggattttttaggttaagaaggatgggttttagtttaggattaaaggagttgtataggaggagagtgattttggaggaatgtttaaggaatgtagggaaggggttggtaggtgagtgagtaataggttgtaggtggaagggtgttagggaaggttaggaaatataggggtagtaggttggagtggggttgggggtggttgaatgaatggatgatggttagggtttaaggattttattagtgagggaagagatagtatagagtatggtagagaaggggaggttgggataggtgtgtagggtgatagaatgggaagtaatttatggattgaggtatgaagaagtagttagcggagaagtttagaaggtattgtttttgagattaggttgaaggagatttttattgtttgtttttgttgtttgttatttggggtttttttttgggttttttttttatttagttattttttagggagaattatgtttttttttttttttatgtttggttatttttaggattgggtaggtagggaggttgggataaagtgagttatatttttttttgttttttttttatgttgttagagttggatttggggtcggtagggggtgagggtatggtatttttggtcgcgggggcgggggggggggttcgggggtcgggggagcgtcgcgttgacggtagttagagtttgcgatgacggggttgttataaataattttttggaggtttttatatttaagtttttttttcgtttttttattgttttttattttttattttttgtttatttttatatcgtttttgtattgttattttattttttattattttatgtttttagttttttttattttttgtttttttgtagtgatttttttgtattttatttttttttagtttttatttcggttttttcggttatttttttagttggttttttttttttttttttgttttttgttttgttgtatatatttttgttttttttttttttttttttgttttattttttttttttttttagttcgtgtattttgttttttattttttttgagtttttttttgtttatagtttttttttattttttatgttttttttttatttttttttttgtttttgttaaaatttgtttttttatgttgtgtttatttattttttgaattattaaatgtttattaggtattagtcgtgtgttaggtttaggttagatatattttttttttgtgtttttatttttttatttttatttttttttttatattgaggttttggtttttggggttatttggaggtattatttagaagtgttttaggtttattttgtttttttttttttttttttttttttttgttatggtttatttttgggttgagatatttttagatgtttttagttttcgtaattttttaggtgtgagatggtgggagtttttttttttttttttttttttttttaaatagaaatagggttttattgtgttgtttagattggttttgaatttttgggtttaagtgatttttttatttcggtttttgaaatgttgggattataggtgtgagttattaggtttaggtggagtaggggagttttttaaaggattttgattttttttatattttttacgttttttttgataggtagggtttttttttgtgtttgtttgggaagggtgtttagggggttttttttttaagtttttattttggaatagattgatgatgtagggtatttatgtgtttaagaagagtaggggggtcgggcgcggtggtttatgtttgtaattttagtattttgggaggttgaattatttgaggttaggagtttgagattagtttgattaatagggtgaaatttcgttttagttaaaaatataaaaaaaaaaaagaaaaaaaaattagttgggtgtgttgaggtaggagagacgtttgagtttaggaggtagaagttgtagtaagtcgagattatattattgtattttagtttgggcgatagagtaagattgttttaaaaaaaaaaaaaaaaaaaaaaaaaggaagagtgggaagttttgattttttttttttttgaattttttgtttgttagggttcggttgatgtaaagttttaaggagttatatttttatgagtttttgttgagttttagtagtgtagttgaggtattggagtttaatttggatgaagattttattattaagttagtgtatagttttattttgggttaggagttttgttttgaggtattgggtttggtgggttggggagggttaaaggataggggtgatggaaggtggggggtagagaggtttagagaaagtggtataggtggggatattaaggaaatagaaatttttgggattggaggaaagggtaggttagggaggaagagaaggtagtagagtttttttttttttgtagtttttttttttaattttatatttttttttaggtaataattttattaggaataaaatgttttgtttgtcggtttgcggtcgaaagagataaatggattgagaatttgtagcgggtagtaaagtttaataaggtattggggaataaaggggatataatttgtgtagggtaaaggttgtattaatacgggaagttgggggtttagggaggaaagtgagttaaaggaggagaggtttggggaaggagaggattgaggtatagtgtatttggataagtagggggagatttttattattttgagttttttattttttttcgttttttgtattgttattttgttttacgatttttttttttgttatagaagttatagatttatagagttgatggggttttggaaattttttagtttagtttttttgtaggtaggaatgttttattaatatttcgtaggatatattaaatatatttagttaagtttttgtattttggttttttttttaagatagagggaattggtggtaatgggttggattaaatgatttttaaggtttttttggtatataaattttatgagtttgttttttttaaaattttatgtttttagttttgttagttattttttgtattttagtttttagtaagtttatagttttagttatatttttttggggggaatttttgtgttttgatgtttttaaagaatttaatttaagatgttgatatgatttgatttatgtagagtataaatattatgtttttttttaatatattgtaatattatttgagttttattattagtttgtgtttaattgtatttttttaggtttttattgatttttttttttttttttttgagatagagttttattttgttatttaggttggagtgtagtggcgtgattttggtttattgtaattttcgttttttgggtttaagtaatttttgtgttttagtttttttagtagttgggattataggtatgtattattatattcgattaatttttgtatttttagtagagacgaggttttattatgttggttaggttagttttaaatttttgattttaggttgtttgtttgttttagttttttaaagtgttaggattataggtatgagttattatatttggttaagttttatttattttatatgtaattttttttttataatttttgatagtttttgtaggattttttagttttttttaaattttatattaatatttttggtttgttattttagtttttgaaatttttttaatattgtttgtgttgtttagtgtatgtttacgtttttatagtagttttttggggttgttataataaattgttataaattgggttacgtaaaataatagaaatttatttttttatagtttaggaggttggaagtttaaaagtaaggtattagtagggttacgttttttttgatgttgtagtagggaatttttttttgtttttttttagttttcggaggttgttagtagtttttggtatttttgggtttataattgtattcgtttaatttttgtttttatttttatgtagttggtttttttttgtgtgtttttgtattttgtatttttgtgtttttaaatttttttttttatataaagatattagtttttataaggtgggttaagggtttattttaatttagtatggttttttttttttgagatggaatatcgtttttgttttttaggtttggagtgtaatggtatgagtttagtttattgtaattttcgttttttaggtttaagtgatttttttgttttagttttttgagtagttgggattataggtacgtgttattatgtttagttaatttgtttttgtatttttattagagacggggttttattatgttggttaggttggttcgaatttttgattttaggtaatttatttatttcggttttttaaagtgttgggattataggaatgagatattatggttggtttttttttagtttgattatatttgtagggattttgtttttaaataagattatatttataggtttagggtagatatgagttttggtgggatattatttaatttagtatatcgttttattttatgattgttgtttgtattttatttttttattgtttttttttttttggtgtttttttgttttttttttttttaatattatgtttattttattatgttaggataatagtcgtcgggtagataatgtgttaaagttgtggattatagaggttcgggagttgttttttaagaagcggtattattgtgagttttgtttggatgatatgttgtatgtacgtattatttttaagtttcgttttgtttttggggatatcgttttttggggcgagtatttcgagtttaataatttgtcggttgttcgtgttttgcggttgtatttgtatcgtgatttagataaaaagcgtaagaaggataaggtaggttatgtcggtttggtgattgtgttagtggttattttggttgggcgttattttatagagtagtggtattttgtaattttgttaataggtagtgggggatttgggggtatgggttcgggagggggagggggttcggggggtggtttagggggtaagggtaaaggaggttgttcggttgtgcggttgaaagtacgttattagataatgagtattttgtttatggagttatataaagagtttgtagagtatgttattaattattatcggatgttgtgtgtagttttggagttcgttttgaatgttaaaggtaaggaggaggttgttagtgtattagtttatattttgtagagtataggtaaggttaaggtgagtgttgtgtttttagggaaaggtgatttgggaatgggtatttgtttgggggttagtgaggatagggtaaatttacgagattgggttgtgtagaggttgatatttggatttttttgggttttaggatttttttttagatatggttatgtttgaggtagatcggtttatggaacgggagtattttatatttcgcgagaatacgtttgttattaaagttatagaagagtatatgagattgattggttagaaatattttaaggatgttattggtatggtttatatttaggtttttttttttttaaatttgttagatgtttattttagattttaagtttatttttttatagtttgatattttttaatttagagttttaggattttagtttttaatatttgattttgaaatttttttaattttggttatttttttttttgtttttggaaagtgtgattatatttttttgtgtttttattttttaggagaatttattcgtgttttgtatgaatttgaggaaaattgcgaggtagattttattaagtgtatagtatttagtttggtagagtattaggttaatttgcgaatgtgttgtgagttggttttgtgtaaggtggttaatttttattggtgagattgggaacgttgggttggggggttagggtcgggggaattatgtgtttatttgtttatttatttgtttatttttaaagaggattgagtattatttatgggtaaagtattgttttaggcgttatagagtaaataggtgaaagaggtttggtttttgtttttagagggtttttattagaatggggataaattagaagaaaaaaaaaaaaagttatagagttataatggtgtgtaagtgttgagtaagggtttttttaatttttgtgtgatataaggttagagagaaggtagagttttgagataagtggggaagaggtgtttttttgggtaggttttgaagattggtttaggttttgatatatggatatagttggtaagaaagatattttagaagaaggttgtgagaaaggtatatgtgtgatggtgaaaaggtttaggagtttttaggggatattaaagtaggttagtagtaattatattaggtttagtggagtatgtgttttataatggggagtggcgggagagatgtttgggtaggaagattagttttagaaattggaaggttttaaggagtttgaggttattggtaggttttgggatgttattaaaggtgttagaaatattgtgatttagaagattaatttataggttgggtacggtggtttatatttgtaatattagtattttgggaggttgaggcgggtagattatttgaggttaggagtttgagattaggttgattaatatggagaaattttgtttttattaaaaatataaaattagttagatgtggtggtatatgtttgtaattttagttattcgggaggttaaggtaggagaattatttgaatttgggaggtggaggttgtagtgagtcgagattatacgattgtattttagtttgggtaataagagtgaaattttattttaaaaaaaaaaaattaatttataagtagagtgtatgtagtagagtagagggatgtatgttgggggatgattggaatagagttagttgggggttcggaggtatgaaagttagattttgaattagaatagtgatagaagttaggaaggagttattggaaggattttttcgggaaaggattagtaggaattgttagtttattggaaaggagggagtatgtttgtggggagttacggatgatttaagaggttatgaggttggtggttgggagatcggtggttttattgataattaggaaagttaggaggaggagttagttggaggtgtgggggcgatggtgagttttgttttatattagtcgagtttaaggtgttagtgggatattgaagtggaattgggaggtgcggggagtgagttttgagttattttagggattggggattatgtttggggtatttttatttttatttttttggaatttagaagagttggggggttcgagttttttgtattttaagtgattttttattttttttttatttttgtttttttttggtgtttgttttttttttttttttttttttgttttttttttatatttttttattttttttttacgtgtttttttttttattttttttttttttttatttttttttttttaatttgtttgttttttttgttatggtttttttttttaagtagttttttattttgtttttgcggtttttttttttttgttttttttatttttgtttttatatttttattttttattattttttttagtatgttttttggaagttgagggtttttggggtttagtttcggtttttttttttttttttttttttttttgttttttcgatttttttttttagcgtgttttcgagggagttgaaggaggtgtttgtttcgtggcggttgcgttgcgtagagcgaggtcgggaggatatcgtagataggtttattagcgttttattttttttgcgttttttttgtttagcgattatgtcgtttagtttttttgggtttatgtaggagtatttagatgagtagattttacgaatttttatttttattgttaaggttatttagaatttggttaatttttttaagtgagggaagttttaggagtgggtagggtagggagtggtagggtagggagtggtagggttgggggtcggtaagaagggttttttgagtttttagagattttgagatggggaggttatgatattttgtgtgtgtgtgtatgtgtgtgtatgtgtgtgtgtgtgtgtgtgtgtgtgtatgtgatttttattttttgtatttttggttaggtttattttaaaggaggattttttgggttttatgaatgagtttttggagttggaatggggttttatgtagtagtttttgtatgagatttttaatttggatacgttaattaatagtagtagttttgagggttatatcgatttgggtcgagagttttttatattgtatgttttattttgggaggtgttgttttagtttagtaaggttagtagattttttttttgttttatttttagatggttttagaggtttttggagtttgagaaattattttttgaagattttttttttttttttgtttttcgaggtgttattattattattttaatttaggttttttttatttgtatttttagaggtttttttagagttgggtattgagtttttaggtaatagttttatttttttaggaagtttttttgaagttgggtttattgtttcggttttttaacgatattagtatagttttgaggaattttaatatttaaaggtagttaagtcgttagagtgagcggtttcggttttagtttgtggtattgcgggggttatcggttgagatgtagggttatatgatgcgggattttaataggtgagtattttgggatagttaggtttgtgttttaggagttttttttttattttagatattttttattgggttttatatgtatttttttagggtttgaaagaagggaggaaaaagtattaagtttttaggggagacgataaggagataggtatagttagtggtaggttgagagttttttatagtttgagggagtgagagatttggagttttaggaatagggttgaggttttattaatttacggtttagttgtaagtttagagtatttttgttgtaagttttgatttgttgtttttttgtttgtttatgttagtttttaggttgaggtttagttagtatgttatgttagttatgtgttaaaatgtttaaatattttagtaatagttagtgaataagtattttttttagttttcgattataattttatagatttttttatgatttagtatttagagtagtgatagtagaagtttagtagggtttgtagtttgttttagagttttagtttttattttgataggtggtgttcgtgttttatttgttgtttattattttgatgatggttttgtttttttttttgttcgtgtttttttttatgatattatatttattttattattttcgtttttttttttatttgtttatatttttttttttttttgtttgtgttcgtttttttttttatttttttttagttttatcgatttttagttttttatggttcgaggttttaataggtgaggggtttttttttttttcgtttttttttttttttttgtttgtttttttttttattttattggttttcgttttattttttttttttttttttttatggattttattttttttatatgtgtttagttttgtttttatttttttttttgttgtttttatttttttttttttaggttttatttttttttcggaggggttttgttttttttttttatttatttgtttttttttattttttttgtttgttttttttagggttgttatcgttagtttttagtttttttttttgggttttattttttattttaaggtttgtgttagattatagtaaggtttaattgttaggagttttgattttattttttgtttgtgtgttttttttttttttgatagttttatggatatggttcgttttttttttttaattaaggaaaagttatttttattatcgtttggtggtggtaaagatttgttttatgtaagtcgtttatttttggttcgttttttattagtatattgtacgagtagttcggatattatagagttagagtagaagatgttgagtgttaataagagtgtgtttatgttggatttatagggtgatgggtttggtggtcgttttaatagtagtagtgtttcgaatttggcggtcgtaggggatttgttgtatttaagttaggtttcgttgatagtagttttggggttacggtttgcgtttgtcggacgttttttttaggggagtggtttatttattacggcggttggtatgcgttttagttagatgggtgttattatagacggtgtttttgtttagtaattgcgaatttttttttttttttagaatttttttttttatatggttgttgatgggttaggttttttaggcggttatggagggggcggtggttatggtttattttttttttattattattattattattattattattatcgaggtggagagttttttggggatatttttgttttattttatggttatagtaagagtgaggatttttttttcggggtttttaagttttttgttgtttttattttttatagttatagttatagtgatgagtttggattttttggtattgattttattcgtcggtagtttttattttaggataatttgtagtatatgttgttttttttttagattattattggtttttagaggttagtttttttagggtttggaggtgggagcggtgggggtagcggtgggggtggcgggggttagtcgtttttattgtagaggggtaagttttagtagttgatagttagcgtagtttagaaatttcggttatttagcgggaatttattgtagtttttagagttaagttatggtttcgttcgtttacggtaatagagttttagtaaggagggtagtattgggggtagcgggggtagcggtggcggagggggtggggggttgaagttttttattattaagtaggtaggtgaaggtaggaggaaggcgggttgggttataatagggagggaagaaggagatggggggtggggttgaaatagagtttgtggtttgaagttataatttttttgtttttttttggttattaaataaatgtgtatagagggtttgttatgtgttatgtgttatgttaggtattaaggatacggtattgaatttttttagtatttttattttagaggggattaatttataagtagaatgggggtgattggaatagggttagttgggggtttggaggtatgaagattagattttgaattagaataataggagaaattttttggtatttaatttatatttttggtatttagaggtgataaaggttatagtagggtaataggattgggattgtcgttttttttggttgtgttgttgttttttaaatgtattttgtttttttttattttttttttttttgttcgtttttattgtgttttgttttagtatttttagatattatttatattgaattttataatgttagtttttgagcggatagtggtttgggtttttaatatgttttatttgtcggttgatatcgagagtgtttatatcgagcgggaagagtataagtttaaggagtatttaaaatcgatggatgagagtcggttggatagggtacgatgggttttattagttttaagttttagtgtttttttttatttataggggagatttttagttatttttaagggaaatttttagggttagttatggtggtaagaaaaggtaaagatttgattattttttgagaagtttttcgtttatttggggagattagatatatatagttgttaaaagttatttttaattttattttgtaggttatatatattatagattatttggggattatttattttaggtttatttttatgtttttttttaggaggaatataagttttggtttttgtgattgtttaggaaaggaaatgttattttattggtagtaggagttaataaattggatggggatggagggggttgtagttatattataagtgatgtttggtttatttagttattgttttatgggtataagtgatagttagtgggtagggaatgtatgtggtaaagtagtatgtattagttatgtgtgaaaagattatttagatttttatttggtggaggttgagggtaaagggtattaagagttttggggttaatatagataatttagtagaaagttatttgaggaagttgttgtttttagggtttgaggaagagggcggttgtaggattaggttatatataaagaatatatgattttaatacggggaagtggtttttgagtataggaaatgttgggattgatttagatgggtttgattagtaaatttaatgagaattaaattttaatattagttttaaggtagttatcgtaggaagttaatttatattttttttttgtatgtagaagggttggtgatatatgtatgtattttttttagagaatgaggaaatagttttttgaattatttttttttttgtgttttagatgaggaaattttgttgagaaaggttgtagattagtattatttaatataattttttgtagtgatgaaatgttttgtaatttgtagtgtttatatgtgtttagttgtgatttaggaattgaatttttagatt
